(19) United States
(12) Patent Application Publication
(10) Pub. No.: US 2011/0190380 A1
(43) Pub. Date: Aug. 4, 2011

(54) METHODS FOR DELIVERY OF SIRNA TO BONE MARROW CELLS AND USES THEREOF

(76) Inventors: Elena Feinstein, Rehovot (IL); Hagar Kalinski, Rishon-le-Zion (IL); Igor Mett, Rehovot (IL); Hagit Ashush, Ashkelon (IL)

(21) Appl. No.: 13/061,934

(22) PCT Filed: Oct. 23, 2008
(86) PCT No.: PCT/IL08/01401

§ 371 Date: Apr. 18, 2011

(51) Int. Cl. A61K 31/7105; A61K 31/7088; C07H 21/00; A61P 35/00

(52) U.S. Cl. 514/44 A; 536/24.5

(57) ABSTRACT

The present invention relates to a method for the delivery of therapeutic oligonucleotides to bone marrow, and in particular delivery of siRNA to a subset of bone marrow cells. The method comprises systemically administering siRNA to a subject in need thereof, to reduce or inhibit expression of a gene associated with a disease or disorder or to symptoms associated with a disease or disorder associated with the cells. The invention further relates to chemically modified siRNA compounds, to pharmaceutical compositions comprising such compounds and to methods of using such compounds and compositions in the treatment of disease.

### FIELD OF THE INVENTION

[0001] The present invention relates to a method for the delivery of therapeutic oligonucleotides to bone marrow, and in particular delivery of siRNA to a subset of bone marrow cells. The method comprises systemically administering siRNA to a subject in need thereof, to reduce or inhibit expression of a gene associated with a disease or disorder or to symptoms associated with a disease or disorder.

### BACKGROUND OF THE INVENTION

### Bone Marrow Cells and Tumorigenesis

[0002] Bone marrow is a specialized tissue that produces a plurality of different cell types, including stromal cells, hematopoietic lineage cells and cells involved in bone remodeling. Bone marrow is the primary source of red blood cells (erythrocytes) and White blood cells in the body. Hematopoiesis is an ongoing process whereby highly specialized blood cells are generated from hematopoietic stem cells (HSC). The specialized cells fall within two functionally distinct groups termed myeloid and lymphoid cells.

[0003] Cells of the lymphoid lineage, which develop into B-cells (lymphocytes) or T-cells (Th or CTL), are produced to varying degrees in the bone marrow, spleen, thymus and lymph nodes. The principle function of B-cells lies in the production of antibodies.

[0004] During normal human adult life, myeloid cells are produced exclusively within the bone marrow. Myeloid stem cells produce the progenitor cells for the neutrophil, monocyte, macrophage, eosinophil, erythrocyte, megakaryocyte, mast cell, platelet and basophil cell types.

[0005] Myeloid lineage hematopoietic cells were shown to stimulate angiogenesis either directly by secreting angiogenic factors or indirectly by producing extracellular matrix-degrading proteases, which in turn release sequestered angiogenic factors (reviewed in Lewis & Pollard. Cancer Res. 2006. 66:605-612; Naldini & Carraro Curr Drug Targets Inflamm Allergy 2005. 4:3-8). Furthermore, Gr1+/CD11b+ progenitor cells isolated from the spleens of tumor-bearing mice promoted angiogenesis when co-injected with tumor cells (Yang, et al. Cancer Cell 2004. 6:409-21). Implantation of tumor cells in mice resulted in upregulation of Bv8 (prokinectin 2; PROK2), mobilization of Gr1+/CD11b+ myeloid cells from the bone marrow and promotion of angiogenesis. An anti-Bv8 antibody suppressed angiogenesis and reduced Gr1+/CD11b+ myeloid cells following implantation of tumor cells in mice. (Shajaei et al, Nature 2007. 450(7171):825-31).

[0006] Myeloid cells accumulating in tumor-bearing hosts play an important role in tumor non-responsiveness by suppressing antigen-specific T cell responses (Almand et al., J. Immunol. 2001. 166:678-689; Bronte et al., J. Immunoth. 2001. 24:431-446; Gabrilovich, Nat Rev Immunol. 2004. 4:941-952; Kusmartsev et al., J. Immunol. 2000.165:779-785; Melani et al., Blood. 2003.102(6):2138-45; Pandit et al., Ann Otol Rhinol Laryngol. 2000. 109:749-754). These cells contribute to the failure of immune therapy in patients with advanced cancer and in tumor-bearing mice. In mice, the myeloid cells are characterized as Gr1+/CD11b+ cells. Morphological analysis demonstrated that they are comprised of a mixture of myeloid cells, such as granulocytes and monocyte-macrophages, as well as myeloid cell precursors at various stages of differentiation. Since they display features of undifferentiated myeloid cells and contain precursors of different myeloid cell subsets, these cells have been termed “immature myeloid cells” (ImC) or myeloid derived suppressive cells (Gabrilovich, et al, Cancer Res. 2007, 67:425). The equivalent cells in human are CD33+CD11b+ cells.

[0007] ImC cells represent about 20-30% of normal bone marrow cells and only 2-4% of all nucleated normal splenocytes. Inoculation of transplantable tumor cells (Kusmartsev et al. supra; Bronte et al., J. Immunol. 1999. 162:5728-37; Gabrilovich et al., J. Immunol. 2001. 166:5398-5406; Subiza et al., Int J. Cancer. 1989, 44:307-314) or spontaneous development of tumors in transgenic mice with tissue-restricted expression of oncogenes (Melani, supra) results in a marked systemic expansion of these cells. The proportion of this myeloid cell population in spleen of tumor-bearing mice may reach up to 50% of all splenocytes (Kusmartsev & Gabrilovich, J Leukoc Biol. 2003, 74(2):186-196). In cancer patients, advanced-stage cancer of head and neck, lung or breast cancers were found to promote the accumulation of these cells in the peripheral blood, whereas surgical resection of the tumors decreased the number of ImC (Almand et al., Clin Cancer Res. 2000, 6:1755-1766).

[0008] The accumulation of Gr1+/CD11b+ myeloid cells is often associated with a large tumor burden and a state of immune suppression (Bronte et al., Blood. 2000, 96:383812; Gabrilovich et al., 2001, supra; Kusmartsev et al, 2000 supra; Melani et al., 2003 supra; Subiza et al., Int J. Cancer. 1989, 44:307-31).

[0009] ImC derived from tumor bearing mice have been shown to
[0010] i) Induce loss or significant decrease of the expression of the T cell receptor ζ chain (CD3ζ CD3 zeta), which is the principal part of TCR complex (Otsuji et al., PNAS USA. 1996, 93:13119-1312);
[0011] ii) Inhibit CD3/CD28-induced T cell activation/proliferation by production of reactive nitrogen and oxygen intermediates (Kusmartsev et al., 2000, supra);
[0012] iii) Inhibit interferon-γ (IFN-γ) production by CD8+T cells in response to the specific peptide presented by MHC class I molecules (Gabrilovich et al., 2001 supra);
[0013] iv) Regulate tumor vascularization and tumor progression by MMP-9 (Yang et al., Cancer Cell. 2004, 6(4):409-21);
[0014] v) Suppress T cell proliferation by producing TGFβ (Beck et al., Eur J Immunol. 2001, 33(1):19-28; Terabe et al., J Exp Med. 2003, 198(11):1741-52; Young et al., J. Immunol. 1996, 156:1916-1921);
[0015] vi) Lead to T cell unresponsiveness by STAT1 (Shankaran et al., Nature. 2001, 410:1107-111).

[0016] Gu et al., (Scan, J. Immunol. 2006, 64:588-594) demonstrated in vitro RNAi for CD80 and CD86 in dendritic cells. Suzuki et al (J of Immunol. 2007.174:88.4) showed immune modulation through in vitro siRNA silencing of CD80 and CD86 in dendritic cells. Terabe et al., (J Exp Med. 2003, 198(11):1741-52) demonstrated that depletion of Gr1+ myeloid cells or blockage of TGFβ in vivo prevented tumor recurrence.

[0017] US Patent Application Publication No. 2007/0264193 is directed to combination therapy for the treatment of resistant tumors.

### NADPH Oxidase

[0018] The NADPH oxidase (NOX) family of proteins in humans consists of at least thirteen unique gene products: NOX1, NOX2 (gp91phox, CYBB), NOX3, NOX4, NOX5, DUOX1 and DUOX2 and associated proteins p22phox (CYBA), NOXO1, NOXO2 (p47phox, NCF1) NOXA1, NOXA2 (p67phox, NCF2) and p40phox (NCF4) (hereinafter “NOX genes). Reactive oxygen species (ROS) generated in many tissues has been shown to originate from the activity of NOX enzymes and NOX gene expression has been associated with various pathological processes (comprehensive review in Bedard and Krause, Physiol. Rev. 2007. 87:245-313,).

[0019] International Patent Publication No. WO 2005/119251 discloses a method of inhibiting NOX3 for treating hearing loss. International Patent Publication No. WO 2002/030453 discloses NADPH oxidase inhibitors for reducing angiogenesis. U.S. Pat. No. 6,846,672 and related patents and patent applications disclose the polynucleotide and polypeptide sequences of the NOX enzymes. US Patent Publication No. 2007/0037883 relates to NOX4 inhibition. U.S. Pat. Nos. 6,846,672; 7,029,673; 7,202,052; 7,202,053 and 7,226,769 disclose NOX enzymes and regulators thereof.

siRNAs and RNA Interference

[0020] RNA interference (RNAi) is a phenomenon involving double-stranded (ds) RNA-dependent gene specific posttranscriptional silencing. Originally, attempts to study this phenomenon and to manipulate mammalian cells experimentally were frustrated by an active, non-specific antiviral defense mechanism which was activated in response to long dsRNA molecules (Gil et al. Apoptosis, 2000. 5:107-114). Later it was discovered that synthetic duplexes of 21 nucleotide RNAs could mediate gene specific RNAi in mammalian cells, without the stimulation of the generic antiviral defense mechanisms (see Elbashir et al. Nature 2001, 411:494-498 and Caplen et al. PNAS USA 2001, 98:9742-9747). As a result, small interfering RNAs (siRNAs), which are short double-stranded RNAs, have become powerful tools in attempting to understand gene function. Thus RNA interference (RNAi) refers to the process of sequence-specific post-transcriptional gene silencing in mammals mediated by small interfering RNAs (siRNAs) (Fire et al, Nature 1998. 391, 806) or microRNAs (miRNA; Ambros, Nature 2004 431:7006, 350-55; and Bartel, Cell. 2004. 116(2):281-97). The corresponding process in plants is commonly referred to as specific post transcriptional gene silencing or RNA silencing and is referred to as quelling in fungi.

[0021] An siRNA is a double-stranded RNA molecule which inhibits, either partially or fully, the expression of a gene/mRNA of its endogenous or cellular counterpart, or of an exogenous gene such as a viral nucleic acid. The mechanism of RNA interference is detailed infra.

[0022] siRNA has recently been successfully used for inhibition in primates (Tolentino et al., Retina 2004. 24(1):132-138). Several studies have revealed that siRNA therapeutics are effective in vivo in both mammals and in humans. Bitko et al., have shown that specific siRNA molecules directed against the respiratory syncytial virus (RSV) nucleocapsid N gene are effective in treating mice when administered intranasally (Bitko et al., Nat. Med. 2005, 11(1):50-55). For a review of the use of siRNA as therapeutics, see Barik (J. Mol. Med. 2005. 83: 764-773).

[0023] None of the above references teaches a method for the targeted delivery of siRNA to the bone marrow or to a particular subset of bone marrow cells. There remains a yet unmet need for safe, targeted and efficient tumor therapy and treatment for transplant rejection.

### SUMMARY OF THE INVENTION

[0024] The present invention is based in part on the unexpected finding that siRNA compounds can be targeted to the bone marrow, and in particular to a subset of bone marrow cells. The high specificity of the siRNA to its target cells affords an effective method for delivery of specific siRNA to those cells and attendant inhibition of target genes in the cells.

[0025] Accordingly, in one aspect the present invention provides a method of treating a bone marrow disorder in a subject in need thereof, which comprises systemically administering to the subject an oligonucleotide which inhibits expression of a target gene associated with the disorder in bone marrow cells of the subject in an amount effective to treat the disorder. In some embodiments the bone marrow cells are immature myeloid cells. In certain embodiments the immature myeloid cells are CD11b+, and preferably CD33+/CD11b+. In various embodiments the oligonucleotide comprises a sufficient number of consecutive nucleotides having a sequence of sufficient homology to a nucleic acid sequence present within the gene to hybridize to the gene and reduce or inhibit expression of the gene in the subject.

[0026] In one aspect the present invention provides a method of treating a disorder associated with immature myeloid cell expansion and or mobilization in a subject in need of such treatment which comprises systemically administering to the subject a therapeutically effective amount of an siRNA directed to a target gene associated with the disorder in an amount effective to treat the subject.

[0027] In another aspect the present invention provides a method of treating cancer in a subject in need of which comprises systemically administering to the subject a therapeutically effective amount of an oligonucleotide which inhibits expression of a target gene expressed in an immature myeloid cell in the subject in an amount effective to treat the subject. In certain embodiments the target gene is selected from a gene whose mRNA is listed in Table A1 and set forth in SEQ ID NOS:1-87. In certain embodiments the gene is selected from ARG1, MMP9, PROK2, NOS2A, TGFβ1, CD80 and STAT1.

[0028] In yet another aspect the present invention provides method of reducing immature myeloid cell expansion or mobilization in a subject in need thereof which comprises systemically administering to the subject a therapeutically effective amount of an oligonucleotide which inhibits expression of a gene expressed in the immature myeloid cell in the subject in an amount effective to reduce immature myeloid cell expansion or mobilization.

[0029] In yet another aspect the present invention provides method of treating a subject suffering from a disorder associated with immature myeloid cell expansion or immature myeloid cell mobilization which comprises systemically administering to the subject a therapeutically effective amount of an oligonucleotide which inhibits expression of a gene expressed in the immature myeloid cell in the subject in an amount effective to reduce immature myeloid cell expansion or mobilization.

[0030] In some embodiments of the methods set forth above the disorder associated with immature myeloid cell expansion and or mobilization is selected from tumorigenesis, tumor progression, tumor neoangiogenesis, tumor resistance, and allograft rejection. In some embodiments the tumor is a solid tumor or a hematopoietic tumor of a myeloid lineage. The tumor can be inter alia head and neck, breast, lung, kidney, prostate, colon or a pancreatic tumor. In some embodiments inhibition of gene expression results in reduced tumor load. The oligonucleotide of the present invention can be administered alone, in combination with one or more additional oligonucleotides and/or in combination with a chemotherapeutic agent. The oligonucleotide is preferable an siRNA comprising a sufficient number of consecutive nucleotides having a sequence of sufficient homology to a nucleic acid sequence present within the gene to hybridize to its corresponding mRNA and reduce or inhibit expression of the target gene in the subject. In other aspects the present invention provides a method of treating a subject suffering from a disorder in which the level of T cell receptor ζ chain (CD3ζ; CD3 zeta) is reduced or absent which comprises systemically administering to the subject an oligonucleotide which inhibits expression of a gene expressed in an immature myeloid cell in the subject in an amount effective to treat the subject.

[0031] Yet in other aspects the present invention provides a method of reducing tumor vascularization and tumor progression in a subject in need thereof which comprises systemically administering to the subject a therapeutically effective amount of an oligonucleotide which inhibits expression of a gene expressed in an immature myeloid cell in the subject in an amount effective to reduce tumor vascularization and tumor progression.

[0032] The present invention further provides a method of preventing allograft transplant rejection in a subject in need thereof which comprises systemically administering to the subject a therapeutically effective amount of an oligonucleotide which inhibits expression of a gene expressed in an immature myeloid cell in the subject in an amount effective to treat the transplant rejection. In certain embodiments the gene is CD80 or CD86.

[0033] In yet another aspect the present invention provides a method of delivering an oligonucleotide to a CD11b+ immature myeloid cell in a subject in need thereof which comprises administering systemically to the subject a therapeutically effective amount of an oligonucleotide which inhibits expression of a gene expressed in the immature myeloid cell in the subject in an amount effective to achieve delivery to the CD11b+ immature myeloid cell.

[0034] In various embodiments of the methods set forth above, the immature myeloid cell is CD33+/CD11b+.

[0035] In certain embodiments of the methods set forth above the oligonucleotide is siRNA.

[0036] In various embodiments of the methods set forth above the siRNA is naked siRNA.

[0037] In various preferred embodiments the siRNA is chemically modified siRNA.

[0038] In various embodiments the siRNA has structure (A) set forth below:

| | | | | |
|---|---|---|---|---|
| (A) | 5′ | (N)ₓ-Z | 3′ | (antisense strand) |
| | 3′ | Z′-(N′)_{y} | 5′ | (sense strand) |

wherein each of N and N′ is a nucleotide selected from an unmodified ribonucleotide, a modified ribonucleotide, an unmodified deoxyribonucleotide and a modified deoxyribonucleotide;
wherein each of (N)ₓ and (N′)_{y} is an oligonucleotide in which each consecutive N or N′ is joined to the next N or N′ by a covalent bond;
wherein each of x and y is an integer between 18 and 40;
wherein each of Z and Z′ may be present or absent, but if present is 1-5 consecutive nucleotides covalently attached at the 3′ terminus of the strand in which it is present; and
wherein the sequence of (N′)_{y} is present within an mRNA expressed in an immature myeloid cell.

[0039] In certain embodiments in (N)x the nucleotides alternate between modified ribonucleotides and unmodified ribonucleotides each modified ribonucleotide being modified so as to have a 2′-O-methyl on its sugar and the ribonucleotide located at the middle position of (N)x being unmodified and the ribonucleotide located at the middle; and wherein the oligonucleotide sequence of (N)x is complementary to the oligonucleotide sequence of (N′).

[0040] In various embodiments (N′)y comprises unmodified ribonucleotides in which one nucleotide at a terminal or penultimate position is modified wherein the modified nucleotide is selected from the group consisting of a mirror nucleotide, a bicyclic nucleotide, a 2′-sugar modified nucleotide, an altriol nucleotide or a nucleotide joined to an adjacent nucleotide by a 2′-5′ phosphodiester bond; and wherein if more than one nucleotide is modified in (N′)y, the modified nucleotides are consecutive.

[0041] In other embodiments in (N′)y the nucleotides alternate between modified ribonucleotides and unmodified ribonucleotides each modified ribonucleotide being modified so as to have a 2′-O-methyl on its sugar and the ribonucleotide located at the middle position of (N)x being unmodified and the ribonucleotide located at the middle; and wherein the oligonucleotide sequence of (N)x is complementary to the oligonucleotide sequence of (N′).

[0042] Preferably Z and Z′ are absent. In certain embodiments x=y=19 or x=y=23. Preferably the oligonucleotide sequence of (N)x is complementary to the oligonucleotide sequence of (N′)y. In other embodiments 1, 2 or 3 mismatches between the sequences of (N)x and (N′)y are allowed.

[0043] In various embodiments of the methods set forth above the mRNA is listed in Tables A1 and A2 and is set forth in SEQ ID NOS: 1-89. In certain preferred embodiments the sequence of (N)ₓ comprises one or more of the antisense sequences present in Tables B (B1-B25; SEQ ID NOS:90-24,075) and Table G (SEQ ID NOS:24,076-24,117).

[0044] In another aspect the present invention provides chemically and or structurally modified siRNA compounds based on Structures (C)-(P) disclosed herein. In various embodiments the siRNA compounds target mRNA set forth in Tables A1 and A2. In various embodiments the oligonucleotide sequence of (N)x is set forth in any one of Tables B (B1-B25; SEQ ID NOS:90-24,075) and Table G (SEQ ID NOS:24,076-24,117).

[0045] In another aspect the present invention provides a pharmaceutical composition comprising a compound according to the invention; and a pharmaceutically acceptable carrier.

[0046] The present invention provides novel oligonucleotide sequences useful in inhibiting a target gene set forth in Tables A1 and A2, and to methods of use thereof. In some embodiments the oligonucleotide is selected from the group consisting of an antisense oligonucleotide, shRNA, siRNA, a ribozyme, miRNA. In certain preferred embodiment the oligonucleotide is siRNA. Tables B1-B17 show 19-mer sense and corresponding antisense oligonucleotides of the present invention. Tables B18-B25 show 19-, 21- and 23-mer compounds for CD80 and CD86. Table G shows certain 19-mer sense and corresponding antisense oligonucleotides directed to various target genes.

[0047] In another aspect the present invention provides chemically and or structurally modified nucleic acid compounds useful in inhibiting expression of a gene selected from the group consisting of CD80, CD86, MMP9, PROK2, NOS2A, ARG1, TGFβ2, STAT1, STAT3, STAT6, RAC1, RAC2, NOX1, NOX2, NOX3, NOX4, NOX5, DUOX1, DUOX2, NOXO1, NOXO2 (p47phox, NCF1), NOXA1, NOXA2 (p67phox, NCF2), CYBA, ELA2, Expi, LDLR, TLR-1, RLF, FGF13, IL-4R, IL-11R, IL-13R, IL-1R2, IL-10, IFN, TNFRSF18, WNT5A, SCAMP1, HSP86, EGFR, EphA5, EphRB2, Eph-RA7, HGF, ANGPTL6, NTF5, CLDN18, MDC15, MMRN1, CD11b, CD14, CD18, CD29 (ITGB1), CD120a, CD120b, Ep-1 (PTGER1), PEX-5, CD33, REG3A, PGK1, ILRN1, CASP2 and HIF1a.

[0048] Novel structures of double stranded oligonucleotides, having advantageous properties and which may be applied to siRNA to any of the above mentioned target sequences, and in particular to the siRNA oligonucleotides disclosed herein. The present invention also provides pharmaceutical compositions comprising one or more such oligonucleotides or a vector capable of expressing the oligonucleotide. The present invention further relates to methods for treating or preventing the incidence or severity of various diseases or conditions in a subject in need thereof wherein the disease or condition and/or symptoms associated therewith. The diseases and disorders are associated with immature myeloid cell expansion and or mobilization. Such methods involve administering to a mammal in need of such treatment a prophylactically or therapeutically effective amount of one or more such compounds, which inhibit or reduce expression or activity of at least one such gene.

[0049] In another aspect, the present invention relates to a method for the treatment of a subject in need of treatment for a disease or disorder or symptoms associated with the disease or disorder, associated with the expression of a gene set forth in Tables A1 and A2 comprising administering to the subject an amount of an siRNA, according to the present invention, in a therapeutically effective dose so as to thereby treat the subject. More specifically, the present invention provides methods and compositions useful in treating a subject suffering from cancer or transplant rejection. The present invention further relates to the use of an oligonucleotide compound for promoting recovery from a disease associated with immature myeloid cell expansion and or cell immobilization. Additionally the present invention relates to the use of an oligonucleotide compound for the preparation useful in treating a disease associated with immature myeloid cell expansion and or cell immobilization.

[0050] Known modified siRNA compounds are explicitly excluded from the present invention.

### BRIEF DESCRIPTION OF THE FIGURES

[0051] FIG. 1: siRNA distribution in various tissues following intravenous administration to normal and 5/6 nephrectomized rats

[0052] FIG. 2: siRNA activity in rat bone marrow cells 24, 48 and 72 hrs following single bolus intravenous injection.

[0053] FIG. 3: Cy3-siRNA distribution as determined by FACS.

[0054] FIG. 4: Characterization of Cy3-siRNA-targeted cell populations in mouse bone marrow.

[0055] FIGS. 5A-5B: Mouse bone marrow cells sorting: BM population after cells sorting based on their FSC/SSC parameters (5A). Cy3 siRNA in R1 and R2 populations after cell sorting (5B).

[0056] FIG. 6: Identification of siRNA positive mouse BM cells by their surface markers. R1 population represents siRNA positive BM cells while R2 population represents the bone marrow cells that were not detected by siRNA.

[0057] FIGS. 7A-7B: Phenotype of mouse bone marrow cells by May-Grünwald-Giemsa staining: phenotype of whole mouse BM cells (7A). Phenotype of the R1 population following cell sorting (7B).

[0058] FIGS. 8A-8C: Gr1+/CD11b+ cells expansion in the BM (8A) PB (8B) and spleen (8C).

[0059] FIGS. 9A-9B: Cy3 siRNA detection in BM cells of tumor-bearing mice. 9A. Cy3-siRNA detection in BM cells. 9B: Distribution of siRNA-positive cells in the BM based on Gr1 and CD11b expression (representative results of one out of three mice).

[0060] FIGS. 10A-10B: Cy3 siRNA detection in the spleen of tumor-bearing mice. 10A. Cy3-siRNA detection in the spleen. 10B. Distribution of siRNA-positive cells in the spleen based on Gr1 and CD11b expression (representative results of one out of three mice).

[0061] FIG. 11: Cy3 siRNA detection in the peripheral blood of tumor-bearing mice.

[0062] FIG. 12: Distribution of siRNA-positive cells in a tumor.

[0063] FIG. 13: Cy3-siRNA delivery to human MonoMac1 cells engrafted to NOD/SCID BM mice.

[0064] FIGS. 14A-14C: Cy3 siRNA delivery to human BM, PB and spleen cells of NOD/SCID chimeric mice.

[0065] FIGS. 15A-15B: CD11b+/Gr1+ cell expansion in the BM and the spleen of NOD/SCID/2 null mouse-bearing HCT116 tumor cells.

[0066] FIGS. 16A-16B: Cy3 siRNA in CD11b+ cells from tumor tissue. Purity of CD11b+Gr1+ cells after purification by CD11b microbeads (16A); siRNA positive CD11b cells from tumor tissue as observed by confocal microscopy. (16B).

### DETAILED DESCRIPTION OF THE INVENTION

[0067] The present invention provides a method for the treatment of various diseases and disorders associated with gene expression in a subset of bone marrow cells, and in particular for the treatment of tumors and leukemias and the prevention of allograft rejection. The present invention is based in part on the unexpected discovery that naked siRNA molecules target the bone marrow, and in particular a subset of bone marrow cells, when administered systemically. The discovery is surprising in view of the known obstacles to siRNA delivery.

[0068] For siRNA molecules to be effective in silencing mRNA of a target gene, the siRNA requires three levels of targeting: to the target tissue, to the target cell type and to the target subcellular compartment. The present invention now discloses systemic treatment of bone marrow diseases and disorders.

[0069] The present invention relates in general to compounds which down-regulate expression of genes expressed in immature myeloid cells, particularly to novel small interfering RNAs (siRNAs), and to the use of these novel siRNAs in the treatment of a subject suffering from medical conditions associated with expression of those genes in the immature myeloid cells.

[0070] Accordingly, in one aspect the present invention provides novel oligonucleotide sequences useful in inhibiting a gene selected from, whose mRNA polynucleotide sequences are set For each gene there is a table for 19-mer sequences, which are prioritized based on their score in the proprietary algorithm as the best sequences for targeting the human gene expression. 21- or 23-mer siRNA sequences can also be generated by 5′ and/or 3′ extension of the 19-mer sequences disclosed herein. Such extension is preferably complementary to the corresponding mRNA sequence. Certain 23-mer oligomers were devised by this method where the order of the prioritization is the order of the corresponding 19-mer.

[0071] Methods, molecules and compositions, which inhibit the genes of the invention, are discussed herein at length, and any of said molecules and/or compositions may be beneficially employed in the treatment of a subject suffering from any of said conditions.

[0072] The siRNAs of the present invention possess structures and modifications which may increase activity, increase stability, and or minimize toxicity; the novel modifications of the siRNAs of the present invention can be beneficially applied to double stranded RNA useful in preventing or attenuating target gene expression, in particular the target genes discussed herein.

[0073] Details of the target genes and their mRNA target is set forth in Tables A1 and A2, hereinbelow. The terms v1, v2 etc refers to splice variant mRNAs.

TABLE A1
Target genes for treatment of cancer and chronic inflammation

| Gene | Full name and Human Gene ID |
|---|---|
| MMP9 | matrix metallopeptidase 9 (gelatinase B, 92 kDa |
| | gelatinase, 92 kDa type IV collagenase |
| | gi\|74272286\|ref\|NM_004994.2 (SEQ ID NO: 1) |
| PROK2 | prokineticin 2, Bv8 |
| | gi\|187167258\|ref\|NM_021935.3 (SEQ ID NO: 2) |
| ARG1 | Arginase I |
| | gi\|10947138\|ref\|NM_000045.2 (SEQ ID NO: 3) |
| Nos-2 | nitric oxide synthase 2A |
| | gi\|206597519\|ref\|NM_000625.4 (SEQ ID NO: 4) |
| TGFβ1 | Transforming Growth Factor beta1 |
| | gi\|63025221\|ref\|NM_000660.3 (SEQ ID NO: 5) |
| STAT1 | signal transducer and activator of transcription 1 |
| | gi\|189458858\|ref\|NM_139266.2 (beta) (SEQ ID NO: 6) |
| | gi\|189458859\|ref\|NM_007315.3 (alpha) (SEQ ID NO: 7) |
| STAT3 | signal transducer and activator of transcription 3 |
| | gi\|47080104\|ref\|NM_139276.2\| (v 1) (SEQ ID NO: 8) |
| | gi\|47080105\|ref\|NM_003150.3 (v 2) (SEQ ID NO: 9) |
| STAT6 | signal transducer and activator of transcription 6 |
| | (IL4 induced) |
| | gi\|23397677\|ref\|NM_003153.3\| (SEQ ID NO: 10) |
| RAC1 | ras-related C3 botulinum toxin substrate 1 (rho family, |
| | small GTP binding protein) |
| | (gi\|38505164\|ref\|NM_198829.1) (SEQ ID NO: 11) |
| RAC2 | ras-related C3 botulinum toxin substrate 2 (rho family, |
| | small GTP binding protein Rac2) |
| | gi\|27881480\|ref\|NM_002872.3 (SEQ ID NO: 12) |
| NOX1 | NADPH oxidase 1 |
| | (gi:148536872, NM_007052.4 isoform 1L) |
| | (SEQ ID NO: 13) |
| | (gi:158536874, NM_013955.2 isoform 1Lv) |
| | (SEQ ID NO: 14) |
| NOX2 | NADPH oxidase 2 |
| (CYBB) | (gi:163854302, NM_000397.3) (SEQ ID NO: 15) |
| NOX3 | NADPH oxidase 3 |
| | gi\|11136625\|ref\|NM_015718.1 (SEQ ID NO: 16) |
| NOX4 | NADPH oxidase 4 |
| | (gi:20149638,NM_016931) (SEQ ID NO: 17) |
| NOX5 | NADPH oxidase 5 |
| | (gi:20127623, NM_024505) (SEQ ID NO: 18) |
| DUOX1 | dual oxidase 1 |
| | gi\|28872749\|ref\|NM_017434.3\| (SEQ ID NO: 19) |
| | gi\|28872750\|ref\|NM_175940.1\| (SEQ ID NO: 20) |
| DUOX2 | Dual oxidase 2 |
| | (gi:132566531, NM_014080) (SEQ ID NO: 21) |
| NOXO1 | NADPH oxidase organizer 1 |
| | (gi:34222190, variant a, NM_144603) (SEQ ID NO: 22) |
| | (gi:41281810, variant b, NM_172167) (SEQ ID NO: 23) |
| | (gi:41281827, variant c, NM_172168) (SEQ ID NO: 24) |
| NOXO2 | NADPH oxidase organizer 2 |
| (p47phox, | (gi:115298671, NM_000265) (SEQ ID NO: 25) |
| NCF1) | |
| NOXA1 | NADPH oxidase activator 1 |
| | (gi:41393186, NM_006647) (SEQ ID NO: 26) |
| NOXA2 | NADPH oxidase activator 2 (p67phox, NCF2) |
| | (gi:189083740, NM_000433.3) (SEQ ID NO: 27) |
| CYBA | cytochrome b-245, alpha polypeptide (p22phox) |
| | gi\|68509913\|ref\|NM_000101.2) (SEQ ID NO: 28) |
| ELA2 | neutrophil elastase |
| | gi\|58530849\|ref\|NM_001972.2\| (SEQ ID NO: 29) |
| Expi | extracellular proteinase inhibitor |
| | gi\|126366027\|ref\|NM_007969.4 (SEQ ID NO: 30) |
| LDLR | low density lipoprotein receptor (familial |
| | hypercholesterolemia) |
| | gi\|8051613\|ref\|NM_000527.2 (SEQ ID NO: 31) |
| TLR-1 | Toll-like receptor 1 |
| | gi\|41350336\|ref\|NM_003263.3 (SEQ ID NO: 32) |
| RLF | rearranged L-myc fusion |
| | gi\|157671948\|ref\|NM_012421.3 (SEQ ID NO: 33) |
| FGF13 | fibroblast growth factor 13 |
| | gi\|16306544\|ref\|NM_004114.2 (v 1A) (SEQ ID NO: 34) |
| | gi\|16306542\|ref\|NM_033642.1 (v 1B) (SEQ ID NO: 35) |
| IL-4R | interleukin 4 receptor |
| | gi\|56788410\|ref\|NM_001008699.1 (v 2) (SEQ ID NO: 36) |
| | gi\|56788409\|ref\|NM_000418.2 (v 1) (SEQ ID NO: 37) |
| IL-11R | interleukin 11 receptor, alpha |
| | gi\|22212920\|ref\|NM_004512.3 (v 1) (SEQ ID NO: 38) |
| | gi\|22212921\|ref\|NM_147162.1 (v 2) (SEQ ID NO: 39) |
| IL-13R | interleukin 13 receptor, alpha2 |
| | gi\|26787976\|ref\|NM_000640.2 (SEQ ID NO: 40) |
| IL-1R2 | interleukin 1 receptor, type II |
| | gi\|27894332\|ref\|NM_004633.3 (v 1) (SEQ ID NO: 41) |
| | gi\|27894333\|ref\|NM_173343.1 (v 2) (SEQ ID NO: 42) |
| IL-10 | interleukin 10 |
| | gi\|24430216\|ref\|NM_000572.2 (SEQ ID NO: 43) |
| IFN | Interferon alpha1 |
| | gi\|13128949\|ref\|NM_024013.1 (SEQ ID NO: 44) |
| TNFRSF18 | tumor necrosis factor receptor superfamily, member 18 |
| | gi\|23238190\|ref\|NM_004195.2 (v 1) (SEQ ID NO: 45) |
| | gi\|23238196\|ref\|NM_148902.1 (v 3) (SEQ ID NO: 46) |
| WNT5A | wingless-type MMTV integration site family, member 5A |
| | gi\|40806204\|ref\|NM_003392.3 (SEQ ID NO: 47) |
| SCAMP1 | Secretory carrier membrane 1 |
| | gi\|116256357\|ref\|NM_004866.4\| (SEQ ID NO: 48) |
| HSP86 | heat shock protein 90 kDa alpha (cytosolic), class A |
| | member 1 |
| | gi\|153792589\|ref\|NM_001017963.2 (v 1) (SEQ ID NO: 49) |
| | gi\|154146190\|ref\|NM_005348.3 (v 2) (SEQ ID NO: 50) |
| EGFR | Epidermal growth factor receptor (erythroblastic |
| | leukemia viral (v-erb-b) oncogene homolog, avian) |
| | gi\|41327737\|ref\|NM_005228.3 (v 1) (SEQ ID NO: 51) |
| | gi\|41327735\|ref\|NM_201284.1 (v 4) (SEQ ID NO: 52) |
| EphA5 | Ephrin receptor A5 |
| | gi\|56119208\|ref\|NM_004439.4 (v 1) (SEQ ID NO: 53) |
| | gi\|32967318\|ref\|NM_182472.1 (v 2) (SEQ ID NO: 54) |
| EphRB2 | Ephrin receptor B2 |
| | gi\|111118977\|ref\|NM_017449.3 (v 1) (SEQ ID NO: 55) |
| | gi\|111118979\|ref\|NM_004442.6 (v 2) (SEQ ID NO: 56) |
| Eph-RA7 | Eprhin receptor A7 |
| | gi\|205277372\|ref\|NM_004440.3 (SEQ ID NO: 57) |
| HGF | Hepatocyte growth factor (hepapoietin A; scatter factor) |
| | gi\|58533164\|ref\|NM_001010933.1 (v 4) (SEQ ID NO: 58) |
| | gi\|58533162\|ref\|NM_001010931.1 (v 2) (SEQ ID NO: 59) |
| ANGPTL6 | Angiopoietin Like-6 |
| | gi\|29893554\|ref\|NM_031917.2\| (SEQ ID NO: 60) |
| NTF5 | Neurotrophin 5 |
| | gi\|169658373\|ref\|NM_006179.4\| (SEQ ID NO: 61) |
| CLDN18 | Claudin-18 |
| | gi\|60115826\|ref\|NM_016369.3 (v 1) (SEQ ID NO: 62) |
| | gi\|60115825\|ref\|NM_001002026.2 (v 2) (SEQ ID NO: 63) |
| MDC15 | ADAM metallopeptidase domain 15 (metargidin) |
| | gi\|46909597\|ref\|NM_207196.1 (v 5) (SEQ ID NO: 64) |
| | gi\|46909599\|ref\|NM_207197.1 (v 6) (SEQ ID NO: 65) |
| MMRN1 | Multimerin 1 (ECM) |
| | gi\|45269140\|ref\|NM_007351.2 (SEQ ID NO: 66) |
| CD11b | integrin, alpha M (complement component 3 |
| | receptor 3 subunit) ITGAM |
| | gi\|88501733\|ref\|NM_000632.3 (SEQ ID NO: 67) |
| CD14 | CD 14 molecule |
| | gi\|91105163\|ref\|NM_000591.2\| (v 1) (SEQ ID NO: 68) |
| | gi\|91105158\|ref\|NM_001040021.1 (v 2) (SEQ ID NO: 69) |
| CD18 | CD18 leukocyte adhesion molecule |
| | gi\|47522671\|ref\|NM_213908.1 (SEQ ID NO: 70) |
| CD29 | integrin, beta 1 (fibronectin receptor, beta polypeptide, |
| (ITGB1) | antigen CD29 includes MDF2, MSK12) |
| | gi\|182519231\|ref\|NM_033666.1 (v 1B) (SEQ ID NO: 71) |
| | gi\|182519232\|ref\|NM_033667.1 (v 1C) (SEQ ID NO: 72) |
| CD120a | tumor necrosis factor receptor superfamily, member 1A |
| | gi\|23312372\|ref\|NM_001065.2 (SEQ ID NO: 73) |
| CD120b | tumor necrosis factor receptor superfamily, member 1B |
| | gi\|23312365\|ref\|NM_001066.2\| (SEQ ID NO: 74) |
| (Ep-1) | prostaglandin E receptor 1 (subtype EP1), 42 kDa |
| PTGER1 | gi\|38505193\|ref\|NM_000955.2 (SEQ ID NO: 75) |
| PEX-5 | peroxisomal biogenesis factor 5 |
| | gi\|196259768\|ref\|NM_000319.3 (SEQ ID NO: 76) |
| CD33 | CD33 molecule |
| | gi\|130979980\|ref\|NM_001772.3 (v 1) (SEQ ID NO: 77) |
| REG3A | Regenerating islet-derived-3a |
| | gi\|4505604\|ref\|NM_002580.1 (v 1) (SEQ ID NO: 78) |
| | gi\|21070992\|ref\|NM_138937.1 (v 3) (SEQ ID NO: 79) |
| PGK1 | phosphoglycerate kinase 1 |
| | gi\|183603937\|ref\|NM_000291.3\| (SEQ ID NO: 80) |
| ILRN1 | interleukin 1 receptor antagonist |
| | gi\|27894315\|ref\|NM_000577.3 (v 3) (SEQ ID NO: 81) |
| | gi\|27894316\|ref\|NM_173841.1 (v 2) (SEQ ID NO: 82) |
| HIF1a | ′hypoxia inducible factor 1, alpha subunit |
| | gi\|194473733\|ref\|NM_001530.3 (v 1) (SEQ ID NO: 83) |
| | gi\|194473734\|ref\|NM_181054.2 (v 2) (SEQ ID NO: 84) |
| CD80 | CD80 molecule |
| | gi\|113722122\|ref\|NM_005191.3 (SEQ ID NO: 87) |
| CASP2 | caspase 2, apoptosis-related cysteine peptidase |
| | gi\|39995058\|ref\|NM_032982.2 (SEQ ID NO: 85) |
| | gi\|39995060\|ref\|NM_032983.2 (SEQ ID NO: 86) |

TABLE A2
Target genes for treatment of allograft rejection

| Gene | Full name and Human Gene ID |
|---|---|
| CD80 | CD80 molecule |
| | gi\|113722122\|ref\|NM_005191.3 (SEQ ID NO: 87) |
| CD86 | CD86 molecule |
| | gi\|91208429\|ref\|NM_175862.3 (v 1) (SEQ ID NO: 88) |
| | gi\|91208432\|ref\|NM_006889.3 (v 2) (SEQ ID NO: 89) |

[0074] Tables A1 and A2 provide the gi (GeneInfo identifier) and accession numbers for polynucleotide sequences of human mRNA to which the oligonucleotide inhibitors of the present invention are directed. (“v” refers to transcript variant)

[0075] Inhibition of the genes in Tables A1 and A2 is useful in treating cancer and transplant rejection, respectively.

### DEFINITIONS

[0076] For convenience certain terms employed in the specification, examples and claims are described herein.

[0077] It is to be noted that, as used herein, the singular forms “a”, “an” and “the” include plural forms unless the content clearly dictates otherwise.

[0078] Where aspects or embodiments of the invention are described in terms of Markush groups or other grouping of alternatives, those skilled in the art will recognize that the invention is also thereby described in terms of any individual member or subgroup of members of the group.

[0079] An “inhibitor” is a compound which is capable of reducing the expression of a gene or the activity of the product of such gene to an extent sufficient to achieve a desired biological or physiological effect. The term “inhibitor” as used herein refers to one or more of an oligonucleotide inhibitor, including siRNA, shRNA, miRNA and ribozymes. Inhibition may also be referred to as down-regulation or, for RNAi, silencing.

[0080] The term “inhibit” as used herein refers to reducing the expression of a gene, a variant thereof or the activity of the product of such gene to an extent sufficient to achieve a desired biological or physiological effect. Inhibition may be complete or partial. For example “inhibition” of a NOX gene means inhibition of the gene expression (transcription or translation) or polypeptide activity of a gene selected from the group NOX4, NOX1, NOX2 (gp91phox, CYBB), NOX3, NOX5, DUOX2, NOXO1, NOXO2, NOXA1 and NOXA2 (p67phox), or SNP (single nucleotide polymorphism) or other variants thereof.

[0081] As used herein, the terms “polynucleotide” and “nucleic acid” may be used interchangeably and refer to nucleotide sequences comprising deoxyribonucleic acid (DNA), and ribonucleic acid (RNA). The terms should also be understood to include, as equivalents, analogs of either RNA or DNA made from nucleotide analogs. Throughout this application mRNA sequences are set forth as representing the corresponding genes. The terms “mRNA polynucleotide sequence” and mRNA are used interchangeably.

[0082] “Oligonucleotide” or “oligomer” refers to a deoxyribonucleotide or ribonucleotide sequence from about 2 to about 50 nucleotides. Each DNA or RNA nucleotide may be independently natural or synthetic, and or modified or unmodified. Modifications include changes to the sugar moiety, the base moiety and or the linkages between nucleotides in the oligonucleotide. The compounds of the present invention encompass molecules comprising deoxyribonucleotides, ribonucleotides, modified deoxyribonucleotides, modified ribonucleotides and combinations thereof.

[0083] The present invention provides methods and compositions for inhibiting expression of a target gene in vivo. In general, the method includes administering oligoribonucleotides, in particular small interfering RNAs (i.e., siRNAs) or a nucleic acid material that can produce siRNA in a cell, to target an mRNA set forth in Tables A1 and A2; in an amount sufficient to down-regulate expression of a target gene by an RNA interference mechanism. In particular, the method can be used to inhibit expression of the gene for treatment of a subject suffering from a disease related to expression of that gene. In accordance with the present invention, the siRNA molecules or inhibitors of the target gene are used as drugs to treat various pathologies.

[0084] “Nucleotide” is meant to encompass deoxyribonucleotides and ribonucleotides, which may be natural or synthetic, and or modified or unmodified. Modifications include changes and substitutions to the sugar moiety, the base moiety and/or the internucleotide linkages.

[0085] All analogs of, or modifications to, a nucleotide/oligonucleotide may be employed with the present invention, provided that said analog or modification does not substantially adversely affect the function of the nucleotide/oligonucleotide. Acceptable modifications include modifications of the sugar moiety, modifications of the base moiety, modifications in the internucleotide linkages and combinations thereof.

[0086] According to one aspect the present invention provides inhibitory oligonucleotide compounds comprising unmodified and modified nucleotides. The compound comprises at least one modified nucleotide selected from the group consisting of a sugar modification, a base modification and an internucleotide linkage modification and may contain DNA, and modified nucleotides such as LNA (locked nucleic acid) including ENA (ethylene-bridged nucleic acid; PNA (peptide nucleic acid); arabinoside; PACE (phosphonoacetate and derivatives thereof), mirror nucleotide, or nucleotides with a 6 carbon sugar.

[0087] In one embodiment the compound comprises a 2′ modification on the sugar moiety of at least one ribonucleotide (“2′ sugar modification”). In certain embodiments the compound comprises 2′O-alkyl or 2′-fluoro or 2′O-allyl or any other 2′ sugar modification, optionally on alternate positions.

[0088] Other stabilizing modifications are also possible (eg. modified nucleotides added to a 3′ or 5′ terminus of an oligomer). In some embodiments the backbone of the oligonucleotides is modified and comprises phosphate-D-ribose entities but may also contain thiophosphate-D-ribose entities, triester, thioate, 2′-5′ bridged backbone (also may be referred to as 5′-2′), PACE modified internucleotide linkage or any other type of modification.

[0089] Other modifications include additions to the 5′ and/or 3′ termini of the oligonucleotides. Such terminal modifications may be lipids, peptides, sugars or other molecules.

[0090] The present invention also relates to compounds which down-regulate expression of various genes, particularly to novel small interfering RNAs (siRNAs), and to the use of these novel siRNAs in the treatment of cancer and transplant rejection.

[0091] Lists of preferred siRNA to be used in the present invention are provided in Tables B ( ) For each gene there is a list of 19-mer sequences (for CD80 and CD86 there are also 21 and 23 mer sequences), which are prioritized based on their score in the proprietary algorithm as the best sequences for targeting the human gene expression. A 21- or 23-mer siRNA sequence can also be generated by 5′ and/or 3′ extension of the 19-mer sequences disclosed herein. Such extension is preferably complementary to the corresponding mRNA sequence. Certain 23-mer oligomers were devised by this method where the order of the prioritization is the order of the corresponding 19-mer. A full list of 21 and 23-mer sequences was provided in the U.S. Ser. No. 61/116,806, which is hereby incorporated by reference in its entirety.

### Cancer

[0092] The present invention relates to the treatment of cancer in a subject which comprises administering systemically to the subject a therapeutically effective amount of an oligonucleotide which inhibits expression of a gene expressed in a myeloid cell in the subject in an amount effective to treat the cancer. The terms “cancer” and “cancerous” refer to or describe the physiological condition in mammals that is typically characterized by unregulated cell growth. Examples of cancer include but are not limited to, carcinoma, lymphoma, blastoma, sarcoma, and leukemia or lymphoid malignancies. Other examples of such cancers include kidney or renal cancer, breast cancer, colon cancer, rectal cancer, colorectal cancer, lung cancer including small-cell lung cancer, non-small cell lung cancer, adenocarcinoma of the lung and squamous carcinoma of the lung, squamous cell cancer (e.g. epithelial squamous cell cancer), cervical cancer, ovarian cancer, prostate cancer, liver cancer, bladder cancer, cancer of the peritoneum, hepatocellular cancer, gastric or stomach cancer including gastrointestinal cancer, gastrointestinal stromal tumors (GIST), pancreatic cancer, head and neck cancer, glioblastoma, retinoblastoma, astrocytoma, thecomas, arrhenoblastomas, hepatoma, hematologic malignancies including non-Hodgkins lymphoma (NHL), multiple myeloma and acute hematologic malignancies, endometrial or uterine carcinoma, endometriosis, fibrosarcomas, choriocarcinoma, salivary gland carcinoma, vulval cancer, thyroid cancer, esophageal carcinomas, hepatic carcinoma, anal carcinoma, penile carcinoma, nasopharyngeal carcinoma, laryngeal carcinomas, Kaposi's sarcoma, melanoma, skin carcinomas, Schwannoma, oligodendroglioma, neuroblastomas, rhabdomyosarcoma, osteogenic sarcoma, leiomyosarcomas, urinary tract carcinomas, thyroid carcinomas, Wilm's tumor, as well as B-cell lymphoma (including low grade/follicular non-Hodgkin's lymphoma (NHL); small lymphocytic (SL) NHL; intermediate grade/follicular NHL; intermediate grade diffuse NHL; high grade immunoblastic NHL; high grade lymphoblastic NHL; high grade small non-cleaved cell NHL; bulky disease NHL; mantle cell lymphoma; AIDS-related lymphoma; and Waldenstrom's Macroglobulinemia); chronic lymphocytic leukemia (CLL); acute lymphoblastic leukemia (ALL); Hairy cell leukemia; chronic myeloblastic leukemia; and post-transplant lymphoproliferative disorder (PTLD), as well as abnormal vascular proliferation associated with phakomatoses, edema (such as that associated with brain tumors), and Meigs' syndrome. “Tumor”, as used herein, refers to all neoplastic cell growth and proliferation, whether malignant or benign, and all pre-cancerous and cancerous cells and tissues.

### Oligonucleotides

[0093] Tables B and G comprise nucleic acid sequences of sense and corresponding antisense oligomers, useful in preparing siRNA compounds. The compounds are used per se, as chemically and or structurally modified compounds.

[0094] The selection and synthesis of siRNA corresponding to known genes has been widely reported; see for example Ui-Tei et al., J Biomed Biotechnol. 2006; 65052; Chalk et al., BBRC. 2004, 319(1):264-74; Sioud & Leirdal, Met. Mol. Biol. 2004, 252:457-69; Levenkova et al., Bioinform. 2004, 20(3):430-2; Ui-Tei et al., NAR. 2004, 32(3):936-48. For examples of the use and production of modified siRNA see for example Braasch et al., Biochem. 2003, 42(26):7967-75; Chiu et al., RNA. 2003, 9(9):1034-48; PCT Publication Nos. WO 2004/015107 and WO 02/44321 and U.S. Pat. Nos. 5,898,031 and 6,107,094.

[0095] The present invention provides double-stranded oligonucleotides (e.g. siRNAs), which down-regulate the expression of a target gene. An siRNA of the invention is a duplex oligoribonucleotide in which the sense strand is derived from the mRNA sequence of the target gene, and the antisense strand is complementary to the sense strand. In general, some deviation from the target mRNA sequence is tolerated without compromising the siRNA activity (see e.g. Czauderna et al., NAR. 2003, 31(11):2705-2716). Without wishing to be bound to theory, an siRNA of the invention inhibits gene expression on a post-transcriptional level with or without destroying the mRNA and an siRNA may target the mRNA for specific cleavage and degradation and/or may inhibit translation from the targeted message.

[0096] In some embodiments an oligonucleotide pair selected from Tables B or G (set forth in SEQ ID NOS:90-24,117) comprises modified siRNA, having one or more of any of the modifications disclosed herein. In various embodiments the siRNA comprises an RNA duplex comprising a first strand and a second strand, whereby the first strand comprises a ribonucleotide sequence at least partially complementary to about 18 to about 40 consecutive nucleotides of a target nucleic acid which is mRNA transcribed from a target gene, and the second strand comprises a ribonucleotide sequence at least partially complementary to the first strand and wherein said first strand and or said second strand comprises a plurality of groups of modified ribonucleotides, optionally having a modification at the 2′-position of the sugar moiety whereby within each strand each group of modified ribonucleotides is flanked on one or both sides by a group of flanking nucleotides, optionally ribonucleotides, whereby each ribonucleotide forming the group of flanking ribonucleotides is selected from an unmodified ribonucleotide or a ribonucleotide having a modification different from the modification of the groups of modified ribonucleotides.

[0097] The group of modified ribonucleotides and/or the group of flanking nucleotides may comprise a number of ribonucleotides selected from the group consisting of an integer from 1 to 12. Accordingly, the group thus comprises one nucleotide, two nucleotides, three nucleotides, four nucleotides, five nucleotides, six nucleotides, seven nucleotides, eight nucleotides, nine nucleotides, ten nucleotides, eleven nucleotides or twelve nucleotides.

[0098] The groups of modified nucleotides and flanking nucleotides may be organized in a pattern on one or both of the strands. In some embodiments the antisense and sense strands comprise alternating unmodified and 2′ sugar modified ribonucleotides. In some preferred embodiments the middle ribonucleotide in the antisense strand is an unmodified nucleotide. For example, in a 19-oligomer antisense strand, ribonucleotide at position 10 is unmodified; in a 21-oligomer antisense strand, the ribonucleotide at position 11 is unmodified; and in a 23-oligomer antisense strand, ribonucleotide at position 12 is unmodified. The modifications or pattern of modification, if any, of the siRNA must be planned to allow for this. In an even-numbered oligomer, e.g. a 22 mer, the middle nucleotide may be at position 11 or 12.

[0099] Possible modifications on the 2′ moiety of the sugar residue include amino, fluoro, methoxy alkoxy, alkyl, amino, fluoro, chloro, bromo, CN, CF, imidazole, carboxylate, thioate, C₁ to C₁₀ lower alkyl, substituted lower alkyl, alkaryl or aralkyl, OCF₃, OCN, O-, S-, or N-alkyl; O-, S, or N-alkenyl; SOCH₃; SO₂CH₃; ONO₂; NO₂, N₃; heterozycloalkyl; heterozycloalkaryl; aminoalkylamino; polyalkylamino or substituted silyl, as, among others, described in European patents EP 0 586 520 B1 or EP 0 618 925 B1. One or more deoxynucleotides are also tolerated in the compounds of the present invention. As used herein, in the description of any strategy for the design of molecules, RNAi or any embodiment of RNAi disclosed herein, the term “end modification” means a chemical entity added to the terminal 5′ or 3′ nucleotide of the sense and/or antisense strand. Examples for such end modifications include, but are not limited to, 3′ or 5′ phosphate, inverted abasic, abasic, amino, fluoro, chloro, bromo, CN, CF₃, methoxy, imidazolyl, carboxylate, phosphothioate, C₁ to C₂₂ and lower alkyl, lipids, sugars and polyaminoacids (i.e. peptides), substituted lower alkyl, alkaryl or aralkyl, OCF₃, OCN, O-, S-, or N-alkyl; O-, S-, or N-alkenyl; SOCH₃; SO₂CH₃; ONO₂; NO₂, N₃; heterocycloalkyl; heterocycloalkaryl; aminoalkylamino; polyalkylamino or substituted silyl, as, among others, described in European patents EP 0 586 520 B1 or EP 0 618 925 B1.

[0100] In some embodiments the siRNA is blunt ended, i.e. Z and Z′ are absent, on one or both ends. More specifically, the siRNA may be blunt ended on the end defined by the 5′-terminus of the first strand and the 3′-terminus of the second strand, and/or the end defined by the 3′-terminus of the first strand and the 5′-terminus of the second strand.

[0101] In other embodiments at least one of the two strands may have an overhang of at least one nucleotide at the 5′-terminus; the overhang may consist of at least one deoxyribonucleotide. At least one of the strands may also optionally have an overhang of at least one nucleotide at the 3′-terminus. The overhang may consist of from about 1 to about 5 nucleotides.

[0102] The length of siRNA duplex is from about 18 to about 40 ribonucleotides, preferably 19, 21 or 23 ribonucleotides. Further, the length of each strand may independently have a length selected from the group consisting of about 15 to about 40 bases, preferably 18 to 23 bases and more preferably 19 bases (modified or unmodified or a combination).

[0103] In certain embodiments the complementarity between said first strand and the target nucleic acid is perfect. In some embodiments, the strands are substantially complementary, i.e. having one, two or up to three mismatches between said first strand and the target nucleic acid. Substantially complementary refers to complementarity of greater than about 84%, to another sequence. For example in a duplex region consisting of 19 base pairs one mismatch results in 94.7% complementarity, two mismatches results in about 89.5% complementarity and 3 mismatches results in about 84.2% complementarity, rendering the duplex region substantially complementary. Accordingly substantially identical refers to identity of greater than about 84%, to another sequence. Thus, the invention provides siRNA comprising a nucleic acid sequence set forth in Tables B and G; wherein 1, 2, or 3 of the nucleotides in one strand or both strands are substituted thereby providing at least one base pair mismatch. The substituted nucleotides in each strand are preferably in the terminal region of one strand or both strands.

[0104] The first strand and the second strand may be linked by a loop structure, which may be comprised of a non-nucleic acid polymer such as, inter alia, polyethylene glycol. Alternatively, the loop structure may be comprised of a nucleic acid, including modified and non-modified ribonucleotides and modified and non-modified deoxyribonucleotides.

[0105] Further, the 5′-terminus of the first strand of the siRNA may be linked to the 3′-terminus of the second strand, or the 3′-terminus of the first strand may be linked to the 5′-terminus of the second strand, said linkage being via a nucleic acid linker typically having a length between 2-100 nucleobases, preferably about 2 to about 30 nucleobases.

[0106] In preferred embodiments of the compounds of the invention having alternating ribonucleotides modified in at least one of the antisense and the sense strands of the compound, for 19 mer and 23 mer oligomers the ribonucleotides at the 5′ and 3′ termini of the antisense strand are modified in their sugar residues, and the ribonucleotides at the 5′ and 3′ termini of the sense strand are unmodified in their sugar residues. For 21 mer oligomers the ribonucleotides at the 5′ and 3′ termini of the sense strand are modified in their sugar residues, and the ribonucleotides at the 5′ and 3′ termini of the antisense strand are unmodified in their sugar residues, or may have an optional additional modification at the 3′ terminus. As mentioned above, it is preferred that the middle nucleotide of the antisense strand is unmodified.

[0107] According to one preferred embodiment of the invention, the antisense and the sense strands of the oligonucleotide/siRNA are phosphorylated only at the 3′-terminus and not at the 5′-terminus. According to another preferred embodiment of the invention, the antisense and the sense strands are non-phosphorylated. According to yet another preferred embodiment of the invention, the 5′ most ribonucleotide in the sense strand is modified to abolish any possibility of in vivo 5′-phosphorylation.

[0108] Any siRNA sequence disclosed herein can be prepared having any of the modifications/structures disclosed herein. The combination of sequence plus structure is novel and can be used in the treatment of the conditions disclosed herein.

siRNA Structures

[0109] The selection and synthesis of siRNA corresponding to known genes has been widely reported; (see for example Ui-Tei et al., J Biomed Biotech. 2006; 2006: 65052; Chalk et al., BBRC. 2004, 319(1): 264-74; Sioud & Leirdal, Met. Mol. Biol.; 2004, 252:457-69; Levenkova et al., Bioinform. 2004, 20(3):430-2; Ui-Tei et al., NAR. 2004, 32(3):936-48).

[0110] For examples of the use of, and production of, modified siRNA see for example Braasch et al., Biochem. 2003, 42(26):7967-75; Chiu et al., RNA, 2003, 9(9):1034-48; PCT publications WO 2004/015107 (atugen AG) and WO 02/44321 (Tuschl et al). U.S. Pat. Nos. 5,898,031 and 6,107,094, teach chemically modified oligomers. US Patent Publication Nos. 2005/0080246 and 2005/0042647 relate to oligomeric compounds having an alternating motif and dsRNA compounds having chemically modified internucleoside linkages, respectively.

[0111] Other modifications have been disclosed. The inclusion of a 5′-phosphate moiety was shown to enhance activity of siRNAs in Drosophila embryos (Boutla, et al., Curr. Biol. 2001, 11:1776-1780) and is required for siRNA function in human HeLa cells (Schwarz et al., Mol. Cell, 2002, 10:537-48). Amarzguioui et al., (NAR, 2003, 31(2):589-95) showed that siRNA activity depended on the positioning of the 2′-O-methyl modifications. Holen et al (NAR. 2003, 31(9):2401-07) report that an siRNA having small numbers of 2′-O-methyl modified nucleosides gave good activity compared to wild type but that the activity decreased as the numbers of 2′-O-methyl modified nucleosides was increased. Chiu and Rana (RNA. 2003, 9:1034-48) teach that incorporation of 2′-O-methyl modified nucleosides in the sense or antisense strand (fully modified strands) severely reduced siRNA activity relative to unmodified siRNA. The placement of a 2′-O-methyl group at the 5′-terminus on the antisense strand was reported to severely limit activity whereas placement at the 3′-terminus of the antisense and at both termini of the sense strand was tolerated (Czaudema et al., NAR. 2003, 31(11):2705-16). The molecules of the present invention offer an advantage in that they are active and or stable, are non-toxic and may be formulated as pharmaceutical compositions for treatment of various diseases.

[0112] The nucleotides can be selected from naturally occurring or synthetic modified bases. Naturally occurring bases include adenine, guanine, cytosine, thymine and uracil. Modified bases of nucleotides include inosine, xanthine, hypoxanthine, 2-aminoadenine, 6-methyl, 2-propyl and other alkyl adenines, 5-halo uracil, 5-halo cytosine, 6-aza cytosine and 6-aza thymine, pseudo uracil, 4-thiouracil, 8-halo adenine, 8-aminoadenine, 8-thiol adenine, 8-thiolalkyl adenines, 8-hydroxyl adenine and other 8-substituted adenines, 8-halo guanines, 8-amino guanine, 8-thiol guanine, 8-thioalkyl guanines, 8-hydroxyl guanine and other substituted guanines, other aza and deaza adenines, other aza and deaza guanines, 5-trifluoromethyl uracil and 5-trifluoro cytosine.

[0113] In addition, analogues of polynucleotides can be prepared wherein the structure of one or more nucleotide is fundamentally altered and better suited as therapeutic or experimental reagents. An example of a nucleotide analog is a peptide nucleic acid (PNA) wherein the deoxyribose (or ribose) phosphate backbone in DNA (or RNA is replaced with a polyamide backbone which is similar to that found in peptides. PNA analogs have been shown to be resistant to enzymatic degradation and to have extended lives in vivo and in vitro.

[0114] Possible modifications to the sugar residue are manifold and include 2′-O alkyl, locked nucleic acid (LNA), glycol nucleic acid (GNA), threose nucleic acid (TNA), arabinoside, altritol (ANA) and other, 6-membered sugars including morpholinos, and cyclohexinyls.

[0115] LNA compounds are disclosed in International Patent Publication Nos. WO 00/47599, WO 99/14226, and WO 98/39352. Examples of siRNA compounds comprising LNA nucleotides are disclosed in Elmen et al., (NAR 2005. 33(1):439-447) and in PCT Patent Publication No. WO 2004/083430.

[0116] The compounds of the present invention can be synthesized using one or more inverted nucleotides, for example inverted thymidine or inverted adenine (for example see Takei, et al., 2002. JBC 277(26):23800-06.

[0117] In the context of the present invention, a “mirror” nucleotide also referred to as a spiegelmer, is a nucleotide with reverse chirality to the naturally occurring or commonly employed nucleotide, i.e., a mirror image of the naturally occurring or commonly employed nucleotide. The mirror nucleotide can be a ribonucleotide (L-RNA) or a deoxyribonucleotide (L-DNA) and may further comprise at least one sugar, base and or backbone modification. U.S. Pat. No. 6,602,858 discloses nucleic acid catalysts comprising at least one L-nucleotide substitution.

[0118] Backbone modifications, such as ethyl (resulting in a phospho-ethyl triester); propyl (resulting in a phospho-propyl triester); and butyl (resulting in a phospho-butyl triester) are also possible. Other backbone modifications include polymer backbones, cyclic backbones, acyclic backbones, thiophosphate-D-ribose backbones, amidates, phosphonoacetate derivatives. Certain structures include siRNA compounds having one or a plurality of 2′-5′ internucleotide linkages (bridges or backbone).

[0119] Additional modifications which may be present in the molecules of the present invention include nucleoside modifications such as artificial nucleic acids, peptide nucleic acid (PNA), morpholino and locked nucleic acid (LNA), glycol nucleic acid (GNA), threose nucleic acid (TNA), arabinoside, and mirror nucleoside (for example, beta-L-deoxynucleoside instead of beta-D-deoxynucleoside Further, said molecules may additionally contain modifications on the sugar, such as 2′ alkyl, 2′ fluoro, 2′O allyl, 2′ amine and 2′ alkoxy. Additional sugar modifications are discussed herein.

[0120] Further, the inhibitory nucleic acid molecules of the present invention may comprise one or more gaps and/or one or more nicks and/or one or more mismatches. Without wishing to be bound by theory, gaps, nicks and mismatches have the advantage of partially destabilizing the nucleic acid/siRNA, so that it may be more easily processed by endogenous cellular machinery such as DICER, DROSHA or RISC into its inhibitory components.

[0121] The molecules of the present invention may comprise siRNAs, synthetic siRNAs, shRNAs and synthetic shRNAs, in addition to other nucleic acid sequences or molecules which encode such molecules or other inhibitory nucleotide molecules.

[0122] The compounds of the present invention may further comprise an end modification. A biotin group may be attached to either the most 5′ or the most 3′ nucleotide of the first and/or second strand or to both ends. In a more preferred embodiment the biotin group is coupled to a polypeptide or a protein. It is also within the scope of the present invention that the polypeptide or protein is attached through any of the other aforementioned modifications.

[0123] The various end modifications as disclosed herein are preferably located at the ribose moiety of a nucleotide of the nucleic acid according to the present invention. More particularly, the end modification may be attached to or replace any of the OH-groups of the ribose moiety, including but not limited to the 2′OH, 3′OH and 5′OH position, provided that the nucleotide thus modified is a terminal nucleotide. Inverted abasic or abasic are nucleotides, either deoxyribonucleotides or ribonucleotides which do not have a nucleobase moiety. This kind of compound is, inter alia, described in Sternberger, et al., (Antisense Nucleic Acid Drug Dev, 2002.12, 131-43).

[0124] In the context of the present invention, a gap in a nucleic acid refers to the absence of one or more internal nucleotides in one strand, while a nick in a nucleic acid refers to the absence of an internucleotide linkage between two adjacent nucleotides in one strand. Any of the molecules of the present invention may contain one or more gaps and/or one or more nicks. Further provided by the present invention is an siRNA encoded by any of the molecules disclosed herein, a vector encoding any of the molecules disclosed herein, and a pharmaceutical composition comprising any of the molecules disclosed herein or the vectors encoding them; and a pharmaceutically acceptable carrier.

[0125] Particular molecules to be administered according to the methods of the present invention are disclosed below under the heading “structural motifs”. For the sake of clarity, any of these molecules can be administered according to any of the methods of the present invention.

### Structural Motifs

[0126] According to the present invention the siRNA compounds that are chemically and or structurally modified according to one of the following modifications set forth in Structures (B)-(P) or as tandem siRNA or RNAstar (see below) are useful in the methods of the present invention.

[0127] In one aspect the present invention provides a compound set forth as Structure (A):

| | | | | |
|---|---|---|---|---|
| (A) | 5′ | (N)ₓ-Z | 3′ | (antisense strand) |
| | 3′ | Z′-(N′)_{y} | 5′ | (sense strand) |

wherein each of N and N′ is a nucleotide selected from an unmodified ribonucleotide, a modified ribonucleotide, an unmodified deoxyribonucleotide and a modified deoxyribonucleotide;
wherein each of (N)ₓ and (N′)_{y} is an oligonucleotide in which each consecutive N or N′ is joined to the next N or N′ by a covalent bond;
wherein each of x and y is an integer between 18 and 40;
wherein each of Z and Z′ may be present or absent, but if present is 1-5 consecutive nucleotides covalently attached at the 3′ terminus of the strand in which it is present; and
wherein the sequence of (N)ₓ comprises an antisense sequence substantially complementary to about 18 to about 40 consecutive ribonucleotides in the mRNA transcribed from a gene.

[0128] In certain embodiments the present invention provides a compound having structure B:

| | | | | |
|---|---|---|---|---|
| (B) | 5′ | (N)x-Z | 3′ | antisense strand |
| | 3′ | Z′-(N′)y | 5′ | sense strand |

wherein each of (N)ₓ and (N′)_{y} is an oligomer in which each consecutive N or N′ is an unmodified ribonucleotide or a modified ribonucleotide joined to the next N or N′ by a covalent bond;
wherein each of x and y is an integer between 18 and 40;
wherein (N)ₓ and (N′)_{y} are fully complementary
wherein each of Z and Z′ may be present or absent, but if present is 1-5 consecutive nucleotides covalently attached at the 3′ terminus of the strand in which it is present;
wherein alternating ribonucleotides in each of (N)ₓ and (N′)_{y} are modified to result in a 2′-O-methyl modification in the sugar residue of the modified ribonucleotides;
wherein the sequence of (N′)_{y} is a sequence complementary to (N)x; and wherein the sequence of (N)ₓ comprises an antisense sequence substantially complementary to about 18 to about 40 consecutive ribonucleotides in the mRNA transcribed from a gene. In some embodiments each of (N)ₓ and (N′)_{y} is independently phosphorylated or non-phosphorylated at the 3′ and 5′ termini.

[0129] In certain embodiments of the invention, alternating ribonucleotides are modified in both the antisense and the sense strands of the compound.

[0130] In certain embodiments wherein each of x and y=19 or 23, each N at the 5′ and 3′ termini of (N)ₓ is modified; and

each N′ at the 5′ and 3′ termini of (N′)_{y} is unmodified.

[0131] In particular embodiments, when x and y=19, the siRNA is modified such that a 2′-O-methyl (2′-OMe) group is present on the first, third, fifth, seventh, ninth, eleventh, thirteenth, fifteenth, seventeenth and nineteenth nucleotide of the antisense strand (N)ₓ, and whereby the very same modification, i.e. a 2′-OMe group, is present at the second, fourth, sixth, eighth, tenth, twelfth, fourteenth, sixteenth and eighteenth nucleotide of the sense strand (N′)_{y}. In various embodiments these particular siRNA compounds are blunt ended at both termini.

[0132] In some embodiments, the present invention provides a compound having Structure (C):

| | | | | |
|---|---|---|---|---|
| (C) | 5′ | (N)x-Z | 3′ | antisense strand |
| | 3′ | Z′-(N′)y | 5′ | sense strand |

wherein each of N and N′ is a nucleotide independently selected from an unmodified ribonucleotide, a modified ribonucleotide, an unmodified deoxyribonucleotide and a modified deoxyribonucleotide;
wherein each of (N)x and (N′)y is an oligomer in which each consecutive nucleotide is joined to the next nucleotide by a covalent bond and each of x and y is an integer between 18 and 40;
wherein in (N)x the nucleotides are unmodified or (N)x comprises alternating modified ribonucleotides and unmodified ribonucleotides; each modified ribonucleotide being modified so as to have a 2′-O-methyl on its sugar and the ribonucleotide located at the middle position of (N)x being modified or unmodified preferably unmodified;
wherein (N′)y comprises unmodified ribonucleotides further comprising one modified nucleotide at a terminal or penultimate position, wherein the modified nucleotide is selected from the group consisting of a mirror nucleotide, a bicyclic nucleotide, a 2′-sugar modified nucleotide, an altritol nucleotide, or a nucleotide joined to an adjacent nucleotide by an internucleotide linkage selected from a 2′-5′ phosphodiester bond, a P-alkoxy linkage or a PACE linkage;
wherein if more than one nucleotide is modified in (N′)y, the modified nucleotides may be consecutive;
wherein each of Z and Z′ may be present or absent, but if present is 1-5 deoxyribonucleotides covalently attached at the 3′ terminus of any oligomer to which it is attached;
wherein the sequence of (N′)_{y} comprises a sequence substantially complementary to (N)x; and wherein the sequence of (N)ₓ comprises an antisense sequence substantially complementary to about 18 to about 40 consecutive ribonucleotides in the mRNA transcribed from a gene.

[0133] In particular embodiments, x=y=19 and in (N)x each modified ribonucleotide is modified so as to have a 2′-O-methyl on its sugar and the ribonucleotide located at the middle of (N)x is unmodified. Accordingly, in a compound wherein x=19, (N)x comprises 2′-O-methyl sugar modified ribonucleotides at positions 1, 3, 5, 7, 9, 11, 13, 15, 17 and 19. In other embodiments, (N)x comprises 2′O Me modified ribonucleotides at positions 2, 4, 6, 8, 11, 13, 15, 17 and 19 and may further comprise at least one abasic or inverted abasic pseudo-nucleotide for example in position 5. In other embodiments, (N)x comprises 2′O Me modified ribonucleotides at positions 2, 4, 8, 11, 13, 15, 17 and 19 and may further comprise at least one abasic or inverted abasic pseudo-nucleotide for example in position 6. In other embodiments, (N)x comprises 2′O Me modified ribonucleotides at positions 2, 4, 6, 8, 11, 13, 17 and 19 and may further comprise at least one abasic or inverted abasic pseudo-nucleotide for example in position 15. In other embodiments, (N)x comprises 2′O Me modified ribonucleotides at positions 2, 4, 6, 8, 11, 13, 15, 17 and 19 and may further comprise at least one abasic or inverted abasic pseudo-nucleotide for example in position 14. In other embodiments, (N)x comprises 2′O Me modified ribonucleotides at positions 1, 2, 3, 7, 9, 11, 13, 15, 17 and 19 and may further comprise at least one abasic or inverted abasic pseudo-nucleotide for example in position 5. In other embodiments, (N)x comprises 2′O Me modified ribonucleotides at positions 1, 2, 3, 5, 7, 9, 11, 13, 15, 17 and 19 and may further comprise at least one abasic or inverted abasic pseudo-nucleotide for example in position 6. In other embodiments, (N)x comprises 2′O Me modified ribonucleotides at positions 1, 2, 3, 5, 7, 9, 11, 13, 17 and 19 and may further comprise at least one abasic or inverted abasic pseudo-nucleotide for example in position 15. In other embodiments, (N)x comprises 2′O Me modified ribonucleotides at positions 1, 2, 3, 5, 7, 9, 11, 13, 15, 17 and 19 and may further comprise at least one abasic or inverted abasic pseudo-nucleotide for example in position 14. In other embodiments, (N)x comprises 2′O Me modified ribonucleotides at positions 2, 4, 6, 7, 9, 11, 13, 15, 17 and 19 and may further comprise at least one abasic or inverted abasic pseudo-nucleotide for example in position 5. In other embodiments, (N)x comprises 2′O Me modified ribonucleotides at positions 1, 2, 4, 6, 7, 9, 11, 13, 15, 17 and 19 and may further comprise at least one abasic or inverted abasic pseudo-nucleotide for example in position 5. In other embodiments, (N)x comprises 2′O Me modified ribonucleotides at positions 2, 4, 6, 8, 11, 13, 14, 16, 17 and 19 and may further comprise at least one abasic or inverted abasic pseudo-nucleotide for example in position 15. In other embodiments, (N)x comprises 2′O Me modified ribonucleotides at positions 1, 2, 3, 5, 7, 9, 11, 13, 14, 16, 17 and 19 and may further comprise at least one abasic or inverted abasic pseudo-nucleotide for example in position 15. In other embodiments, (N)x comprises 2′O Me modified ribonucleotides at positions 2, 4, 6, 8, 11, 13, 15, 17 and 19 and may further comprise at least one abasic or inverted abasic pseudo-nucleotide for example in position 7. In other embodiments, (N)x comprises 2′O Me modified ribonucleotides at positions 2, 4, 6, 11, 13, 15, 17 and 19 and may further comprise at least one abasic or inverted abasic pseudo-nucleotide for example in position 8. In other embodiments, (N)x comprises 2′O Me modified ribonucleotides at positions 2, 4, 6, 8, 11, 13, 15, 17 and 19 and may further comprise at least one abasic or inverted abasic pseudo-nucleotide for example in position 9. In other embodiments, (N)x comprises 2′O Me modified ribonucleotides at positions 2, 4, 6, 8, 11, 13, 15, 17 and 19 and may further comprise at least one abasic or inverted abasic pseudo-nucleotide for example in position 10. In other embodiments, (N)x comprises 2′O Me modified ribonucleotides at positions 2, 4, 6, 8, 13, 15, 17 and 19 and may further comprise at least one abasic or inverted abasic pseudo-nucleotide for example in position 11. In other embodiments, (N)x comprises 2′O Me modified ribonucleotides at positions 2, 4, 6, 8, 11, 13, 15, 17 and 19 and may further comprise at least one abasic or inverted abasic pseudo-nucleotide for example in position 12. In other embodiments, (N)x comprises 2′O Me modified ribonucleotides at positions 2, 4, 6, 8, 11, 15, 17 and 19 and may further comprise at least one abasic or inverted abasic pseudo-nucleotide for example in position 13.

[0134] In yet other embodiments (N)x comprises at least one nucleotide mismatch relative to the target gene. In certain preferred embodiments, (N)x comprises a single nucleotide mismatch on position 5, 6, or 14. In one embodiment of Structure (C), at least two nucleotides at either or both the 5′ and 3′ termini of (N′)y are joined by a 2′-5′ phosphodiester bond. In certain preferred embodiments x=y=19 or x=y=23; in (N)x the nucleotides alternate between modified ribonucleotides and unmodified ribonucleotides, each modified ribonucleotide being modified so as to have a 2′-O-methyl on its sugar and the ribonucleotide located at the middle of (N)x being unmodified; and three nucleotides at the 3′ terminus of (N′)y are joined by two 2′-5′ phosphodiester bonds (set forth herein as Structure I). In other preferred embodiments, x=y=19 or x=y=23; in (N)x the nucleotides alternate between modified ribonucleotides and unmodified ribonucleotides, each modified ribonucleotide being modified so as to have a 2′-O-methyl on its sugar and the ribonucleotide located at the middle of (N)x being unmodified; and four consecutive nucleotides at the 5′ terminus of (N′)y are joined by three 2′-5′ phosphodiester bonds. In a further embodiment, an additional nucleotide located in the middle position of (N)y may be modified with 2′-O-methyl on its sugar. In another preferred embodiment, in (N)x the nucleotides alternate between 2′-O-methyl modified ribonucleotides and unmodified ribonucleotides, and in (N′)y four consecutive nucleotides at the 5′ terminus are joined by three 2′-5′ phosphodiester bonds and the 5′ terminal nucleotide or two or three consecutive nucleotides at the 5′ terminus comprise 3′-O-methyl modifications.

[0135] In certain preferred embodiments of Structure C, x=y=19 and in (N′)y, at least one position comprises an abasic or inverted abasic pseudo-nucleotide, preferably five positions comprises an abasic or inverted abasic pseudo-nucleotides. In various embodiments, the following positions comprise an abasic or inverted abasic: positions 1 and 16-19, positions 15-19, positions 1-2 and 17-19, positions 1-3 and 18-19, positions 1-4 and 19 and positions 1-5. (N′)y may further comprise at least one LNA nucleotide.

[0136] In certain preferred embodiments of Structure C, x=y=19 and in (N′)y the nucleotide in at least one position comprises a mirror nucleotide, a deoxyribonucleotide and a nucleotide joined to an adjacent nucleotide by a 2′-5′ internucleotide bond.

[0137] In certain preferred embodiments of Structure C, x=y=19 and (N′)y comprises a mirror nucleotide. In various embodiments the mirror nucleotide is an L-DNA nucleotide. In certain embodiments the L-DNA is L-deoxyribocytidine. In some embodiments (N′)y comprises L-DNA at position 18. In other embodiments (N′)y comprises L-DNA at positions 17 and 18. In certain embodiments (N′)y comprises L-DNA substitutions at positions 2 and at one or both of positions 17 and 18. In certain embodiments (N′)y further comprises a 5′ terminal cap nucleotide such as 5′-O-methyl DNA or an abasic or inverted abasic pseudo-nucleotide as an overhang.

[0138] In yet other embodiments (N′)y comprises at least one nucleotide mismatch relative to the target gene. In certain preferred embodiments, (N′)y comprises a single nucleotide mismatch on position 6, 14, or 15.

[0139] In yet other embodiments (N′)y comprises a DNA at position 15 and L-DNA at one or both of positions 17 and 18. In that structure, position 2 may further comprise an L-DNA or an abasic pseudo-nucleotide.

[0140] Other embodiments of Structure C are envisaged wherein x=y=21 or wherein x=y=23; in these embodiments the modifications for (N′)y discussed above instead of being on positions 15, 16, 17, 18 are on positions 17, 18, 19, 20 for 21 mer and on positions 19, 20, 21, 22 for 23 mer; similarly the modifications at one or both of positions 17 and 18 are on one or both of positions 19 or 20 for the 21 mer and one or both of positions 21 and 22 for the 23 mer. All modifications in the 19 mer are similarly adjusted for the 21 and 23 mers.

[0141] According to various embodiments of Structure (C), in (N′)y 2, 3, 4, 5, 6, 7, 8, 9, 10, 11, 12, 13 or 14 consecutive ribonucleotides at the 3′ terminus are linked by 2′-5′ internucleotide linkages In one preferred embodiment, four consecutive nucleotides at the 3′ terminus of (N′)y are joined by three 2′-5′ phosphodiester bonds, wherein one or more of the 2′-5′ nucleotides which form the 2′-5′ phosphodiester bonds further comprises a 3′-O-methyl sugar modification. Preferably the 3′ terminal nucleotide of (N′)y comprises a 2′-O-methyl sugar modification. In certain preferred embodiments of Structure C, x=y=19 and in (N′)y two or more consecutive nucleotides at positions 15, 16, 17, 18 and 19 comprise a nucleotide joined to an adjacent nucleotide by a 2′-5′ internucleotide bond. In various embodiments the nucleotide forming the 2′-5′ internucleotide bond comprises a 3′ deoxyribose nucleotide or a 3′ methoxy nucleotide. In some embodiments the nucleotides at positions 17 and 18 in (N′)y are joined by a 2′-5′ internucleotide bond. In other embodiments the nucleotides at positions 16, 17, 18, 16-17, 17-18, or 16-18 in (N′)y are joined by a 2′-5′ internucleotide bond.

[0142] In certain embodiments (N′)y comprises an L-DNA at position 2 and 2′-5′ internucleotide bonds at positions 16, 17, 18, 16-17, 17-18, or 16-18. In certain embodiments (N′)y comprises 2′-5′ internucleotide bonds at positions 16, 17, 18, 16-17, 17-18, or 16-18 and a 5′ terminal cap nucleotide.

[0143] According to various embodiments of Structure (C), in (N′)y 2, 3, 4, 5, 6, 7, 8, 9, 10, 11, 12, 13 or 14 consecutive nucleotides at either terminus or 2-8 modified nucleotides at each of the 5′ and 3′ termini are independently mirror nucleotides. In some embodiments the mirror nucleotide is an L-ribonucleotide. In other embodiments the mirror nucleotide is an L-deoxyribonucleotide. The mirror nucleotide may further be modified at the sugar or base moiety or in an internucleotide linkage.

[0144] In one preferred embodiment of Structure (C), the 3′ terminal nucleotide or two or three consecutive nucleotides at the 3′ terminus of (N′)y are L-deoxyribonucleotides.

[0145] In other embodiments of Structure (C), in (N′)y 2, 3, 4, 5, 6, 7, 8, 9, 10, 11, 12, 13 or 14 consecutive ribonucleotides at either terminus or 2-8 modified nucleotides at each of the 5′ and 3′ termini are independently 2′ sugar modified nucleotides. In some embodiments the 2′ sugar modification comprises the presence of an amino, a fluoro, an alkoxy or an alkyl moiety. In certain embodiments the 2′ sugar modification comprises a methoxy moiety (2′-OMe).

[0146] In one series of preferred embodiments, three, four or five consecutive nucleotides at the 5′ terminus of (N′)y comprise the 2′-OMe modification. In another preferred embodiment, three consecutive nucleotides at the 3′ terminus of (N′)y comprise the 2′-O-methyl modification.

[0147] In some embodiments of Structure (C), in (N′)y 2, 3, 4, 5, 6, 7, 8, 9, 10, 11, 12, 13 or 14 consecutive ribonucleotides at either or 2-8 modified nucleotides at each of the 5′ and 3′ termini are independently bicyclic nucleotide. In various embodiments the bicyclic nucleotide is a locked nucleic acid (LNA). A 2′-O, 4′-C-ethylene-bridged nucleic acid (ENA) is a species of LNA (see below).

[0148] In various embodiments (N′)y comprises modified nucleotides at the 5′ terminus or at both the 3′ and 5′ termini.

[0149] In some embodiments of Structure (C), at least two nucleotides at either or both the 5′ and 3′ termini of (N′)y are joined by P-ethoxy backbone modifications. In certain preferred embodiments x=y=19 or x=y=23; in (N)x the nucleotides alternate between modified ribonucleotides and unmodified ribonucleotides, each modified ribonucleotide being modified so as to have a 2′-O-methyl on its sugar and the ribonucleotide located at the middle position of (N)x being unmodified; and four consecutive nucleotides at the 3′ terminus or at the 5′ terminus of (N′)y are joined by three P-ethoxy backbone modifications. In another preferred embodiment, three consecutive nucleotides at the 3′ terminus or at the 5′ terminus of (N′)y are joined by two P-ethoxy backbone modifications.

[0150] In some embodiments of Structure (C), in (N′)y 2, 3, 4, 5, 6, 7 or 8, consecutive ribonucleotides at each of the 5′ and 3′ termini are independently mirror nucleotides, nucleotides joined by 2′-5′ phosphodiester bond, 2′ sugar modified nucleotides or bicyclic nucleotide. In one embodiment, the modification at the 5′ and 3′ termini of (N′)y is identical. In one preferred embodiment, four consecutive nucleotides at the 5′ terminus of (N′)y are joined by three 2′-5′ phosphodiester bonds and three consecutive nucleotides at the 3′ terminus of (N′)y are joined by two 2′-5′ phosphodiester bonds. In another embodiment, the modification at the 5′ terminus of (N′)y is different from the modification at the 3′ terminus of (N′)y. In one specific embodiment, the modified nucleotides at the 5′ terminus of (N′)y are mirror nucleotides and the modified nucleotides at the 3′ terminus of (N′)y are joined by 2′-5′ phosphodiester bond. In another specific embodiment, three consecutive nucleotides at the 5′ terminus of (N′)y are LNA nucleotides and three consecutive nucleotides at the 3′ terminus of (N′)y are joined by two 2′-5′ phosphodiester bonds. In (N)x the nucleotides alternate between modified ribonucleotides and unmodified ribonucleotides, each modified ribonucleotide being modified so as to have a 2′-O-methyl on its sugar and the ribonucleotide located at the middle of (N)x being unmodified, or the ribonucleotides in (N)x being unmodified

[0151] In another embodiment of Structure (C), the present invention provides a compound wherein x=y=19 or x=y=23; in (N)x the nucleotides alternate between modified ribonucleotides and unmodified ribonucleotides, each modified ribonucleotide being modified so as to have a 2′-O-methyl on its sugar and the ribonucleotide located at the middle of (N)x being unmodified; three nucleotides at the 3′ terminus of (N′)y are joined by two 2′-5′ phosphodiester bonds and three nucleotides at the 5′ terminus of (N′)y are LNA such as ENA.

[0152] In another embodiment of Structure (C), five consecutive nucleotides at the 5′ terminus of (N′)y comprise the 2′-O-methyl sugar modification and two consecutive nucleotides at the 3′ terminus of (N′)y are L-DNA.

[0153] In yet another embodiment, the present invention provides a compound wherein x=y=19 or x=y=23; (N)x consists of unmodified ribonucleotides; three consecutive nucleotides at the 3′ terminus of (N′)y are joined by two 2′-5′ phosphodiester bonds and three consecutive nucleotides at the 5′ terminus of (N′)y are LNA such as ENA.

[0154] According to other embodiments of Structure (C), in (N′)y the 5′ or 3′ terminal nucleotide, or 2, 3, 4, 5 or 6 consecutive nucleotides at either termini or 1-4 modified nucleotides at each of the 5′ and 3′ termini are independently phosphonocarboxylate or phosphinocarboxylate nucleotides (PACE nucleotides). In some embodiments the PACE nucleotides are deoxyribonucleotides. In some preferred embodiments in (N′)y, 1 or 2 consecutive nucleotides at each of the 5′ and 3′ termini are PACE nucleotides. Examples of PACE nucleotides and analogs are disclosed in U.S. Pat. Nos. 6,693,187 and 7,067,641 both incorporated by reference.

[0155] In additional embodiments, the present invention provides a compound having Structure (D):

| | | | | |
|---|---|---|---|---|
| (D) | 5′ | (N)x-Z | 3′ | antisense strand |
| | 3′ | Z′-(N′)y | 5′ | sense strand |

wherein each of N and N′ is a nucleotide selected from an unmodified ribonucleotide, a modified ribonucleotide, an unmodified deoxyribonucleotide or a modified deoxyribonucleotide;
wherein each of (N)x and (N′)y is an oligomer in which each consecutive nucleotide is joined to the next nucleotide by a covalent bond and each of x and y is an integer between 18 and 40;
wherein (N)x comprises unmodified ribonucleotides further comprising one modified nucleotide at the 3′ terminal or penultimate position, wherein the modified nucleotide is selected from the group consisting of a bicyclic nucleotide, a 2′ sugar modified nucleotide, a mirror nucleotide, an altritol nucleotide, or a nucleotide joined to an adjacent nucleotide by an internucleotide linkage selected from a 2′-5′ phosphodiester bond, a P-alkoxy linkage or a PACE linkage;
wherein (N′)y comprises unmodified ribonucleotides further comprising one modified nucleotide at the 5′ terminal or penultimate position, wherein the modified nucleotide is selected from the group consisting of a bicyclic nucleotide, a 2′ sugar modified nucleotide, a mirror nucleotide, an altritol nucleotide, or a nucleotide joined to an adjacent nucleotide by an internucleotide linkage selected from a 2′-5′ phosphodiester bond, a P-alkoxy linkage or a PACE linkage;
wherein in each of (N)x and (N′)y modified and unmodified nucleotides are not alternating;
wherein each of Z and Z′ may be present or absent, but if present is 1-5 deoxyribonucleotides covalently attached at the 3′ terminus of any oligomer to which it is attached;
wherein the sequence of (N′)_{y} is a sequence substantially complementary to (N)x; and wherein the sequence of (N)ₓ comprises an antisense sequence having substantial identity to about 18 to about 40 consecutive ribonucleotides in the mRNA transcribed from a gene.

[0156] In one embodiment of Structure (D), x=y=19 or x=y=23; (N)x comprises unmodified ribonucleotides in which two consecutive nucleotides linked by one 2′-5′ internucleotide linkage at the 3′ terminus; and (N′)y comprises unmodified ribonucleotides in which two consecutive nucleotides linked by one 2′-5′ internucleotide linkage at the 5′ terminus.

[0157] In some embodiments, x=y=19 or x=y=23; (N)x comprises unmodified ribonucleotides in which three consecutive nucleotides at the 3′ terminus are joined together by two 2′-5′ phosphodiester bonds; and (N′)y comprises unmodified ribonucleotides in which four consecutive nucleotides at the 5′ terminus are joined together by three 2′-5′ phosphodiester bonds (set forth herein as Structure II).

[0158] According to various embodiments of Structure (D) 2, 3, 4, 5, 6, 7, 8, 9, 10, 11, 12, 13 or 14 consecutive ribonucleotides starting at the ultimate or penultimate position of the 3′ terminus of (N)x and 2, 3, 4, 5, 6, 7, 8, 9, 10, 11, 12, 13 or 14 consecutive ribonucleotides starting at the ultimate or penultimate position of the 5′ terminus of (N′)y are linked by 2′-5′ internucleotide linkages.

[0159] According to one preferred embodiment of Structure (D), four consecutive nucleotides at the 5′ terminus of (N′)y are joined by three 2′-5′ phosphodiester bonds and three consecutive nucleotides at the 3′ terminus of (N′)x are joined by two 2′-5′ phosphodiester bonds. Three nucleotides at the 5′ terminus of (N′)y and two nucleotides at the 3′ terminus of (N′)x may also comprise 3′-O-methyl modifications.

[0160] According to various embodiments of Structure (D), 2, 3, 4, 5, 6, 7, 8, 9, 10, 11, 12, 13 or 14 consecutive nucleotides starting at the ultimate or penultimate position of the 3′ terminus of (N)x and 2, 3, 4, 5, 6, 7, 8, 9, 10, 11, 12, 13 or 14 consecutive ribonucleotides starting at the ultimate or penultimate position of the 5′ terminus of (N′)y are independently mirror nucleotides. In some embodiments the mirror is an L-ribonucleotide. In other embodiments the mirror nucleotide is L-deoxyribonucleotide.

[0161] In other embodiments of Structure (D), 2, 3, 4, 5, 6, 7, 8, 9, 10, 11, 12, 13 or 14 consecutive ribonucleotides starting at the ultimate or penultimate position of the 3′ terminus of (N)x and 2, 3, 4, 5, 6, 7, 8, 9, 10, 11, 12, 13 or 14 consecutive ribonucleotides starting at the ultimate or penultimate position of the 5′ terminus of (N′)y are independently 2′ sugar modified nucleotides. In some embodiments the 2′ sugar modification comprises the presence of an amino, a fluoro, an alkoxy or an alkyl moiety. In certain embodiments the 2′ sugar modification comprises a methoxy moiety (2′-OMe).

[0162] In one preferred embodiment of Structure (D), five consecutive nucleotides at the 5′ terminus of (N′)y comprise the 2′-O-methyl modification and five consecutive nucleotides at the 3′ terminus of (N′)x comprise the 2′-O-methyl modification. In another preferred embodiment of Structure (D), ten consecutive nucleotides at the 5′ terminus of (N′)y comprise the 2′-O-methyl modification and five consecutive nucleotides at the 3′ terminus of (N′)x comprise the 2′-O-methyl modification. In another preferred embodiment of Structure (D), thirteen consecutive nucleotides at the 5′ terminus of (N′)y comprise the 2′-O-methyl modification and five consecutive nucleotides at the 3′ terminus of (N′)x comprise the 2′-O-methyl modification.

[0163] In some embodiments of Structure (D), in (N′)y 2, 3, 4, 5, 6, 7, 8, 9, 10, 11, 12, 13 or 14 consecutive ribonucleotides starting at the ultimate or penultimate position of the 3′ terminus of (N)x and 2, 3, 4, 5, 6, 7, 8, 9, 10, 11, 12, 13 or 14 consecutive ribonucleotides starting at the ultimate or penultimate position of the 5′ terminus of (N′)y are independently a bicyclic nucleotide. In various embodiments the bicyclic nucleotide is a locked nucleic acid (LNA) such as a 2′-O, 4′-C-ethylene-bridged nucleic acid (ENA).

[0164] In various embodiments of Structure (D), (N′)y comprises a modified nucleotide selected from a bicyclic nucleotide, a 2′ sugar modified nucleotide, a mirror nucleotide, an altritol nucleotide or a nucleotide joined to an adjacent nucleotide by an internucleotide linkage selected from a 2′-5′ phosphodiester bond, a P-alkoxy linkage or a PACE linkage;

[0165] In various embodiments of Structure (D), (N)x comprises a modified nucleotide selected from a bicyclic nucleotide, a 2′ sugar modified nucleotide, a mirror nucleotide, an altritol nucleotide or a nucleotide joined to an adjacent nucleotide by an internucleotide linkage selected from a 2′-5′ phosphodiester bond, a P-alkoxy linkage or a PACE linkage;

[0166] In embodiments wherein each of the 3′ and 5′ termini of the same strand comprises a modified nucleotide, the modification at the 5′ and 3′ termini is identical. In another embodiment, the modification at the 5′ terminus is different from the modification at the 3′ terminus of the same strand. In one specific embodiment, the modified nucleotides at the 5′ terminus are mirror nucleotides and the modified nucleotides at the 3′ terminus of the same strand are joined by 2′-5′ phosphodiester bond.

[0167] In one specific embodiment of Structure (D), five consecutive nucleotides at the 5′ terminus of (N′)y comprise the 2′-O-methyl modification and two consecutive nucleotides at the 3′ terminus of (N′)y are L-DNA. In addition, the compound may further comprise five consecutive 2′-O-methyl modified nucleotides at the 3′ terminus of (N′)x.

[0168] In various embodiments of Structure (D), the modified nucleotides in (N)x are different from the modified nucleotides in (N′)y. For example, the modified nucleotides in (N)x are 2′ sugar modified nucleotides and the modified nucleotides in (N′)y are nucleotides linked by 2′-5′ internucleotide linkages. In another example, the modified nucleotides in (N)x are mirror nucleotides and the modified nucleotides in (N′)y are nucleotides linked by 2′-5′ internucleotide linkages. In another example, the modified nucleotides in (N)x are nucleotides linked by 2′-5′ internucleotide linkages and the modified nucleotides in (N′)y are mirror nucleotides.

[0169] In additional embodiments, the present invention provides a compound having Structure (E):

| | | | | |
|---|---|---|---|---|
| (E) | 5′ | (N)x-Z | 3′ | antisense strand |
| | 3′ | Z′-(N′)y | 5′ | sense strand |

wherein each of N and N′ is a nucleotide selected from an unmodified ribonucleotide, a modified ribonucleotide, an unmodified deoxyribonucleotide or a modified deoxyribonucleotide;
wherein each of (N)x and (N′)y is an oligomer in which each consecutive nucleotide is joined to the next nucleotide by a covalent bond and each of x and y is an integer between 18 and 40;
wherein (N)x comprises unmodified ribonucleotides further comprising one modified nucleotide at the 5′ terminal or penultimate position, wherein the modified nucleotide is selected from the group consisting of a bicyclic nucleotide, a 2′ sugar modified nucleotide, a mirror nucleotide, an altritol nucleotide, or a nucleotide joined to an adjacent nucleotide by an internucleotide linkage selected from a 2′-5′ phosphodiester bond, a P-alkoxy linkage or a PACE linkage;
wherein (N′)y comprises unmodified ribonucleotides further comprising one modified nucleotide at the 3′ terminal or penultimate position, wherein the modified nucleotide is selected from the group consisting of a bicyclic nucleotide, a 2′ sugar modified nucleotide, a mirror nucleotide, an altritol nucleotide, or a nucleotide joined to an adjacent nucleotide by an internucleotide linkage selected from a 2′-5′ phosphodiester bond, a P-alkoxy linkage or a PACE linkage;
wherein in each of (N)x and (N′)y modified and unmodified nucleotides are not alternating;
wherein each of Z and Z′ may be present or absent, but if present is 1-5 deoxyribonucleotides covalently attached at the 3′ terminus of any oligomer to which it is attached;
wherein the sequence of (N′)y is a sequence substantially complementary to (N)x; and wherein the sequence of (N)ₓ comprises an antisense sequence having substantial identity to about 18 to about 40 consecutive ribonucleotides in the mRNA transcribed from a gene.

[0170] In certain preferred embodiments the ultimate nucleotide at the 5′ terminus of (N)x is unmodified.

[0171] According to various embodiments of Structure (E) 2, 3, 4, 5, 6, 7, 8, 9, 10, 11, 12, 13 or 14 consecutive ribonucleotides starting at the ultimate or penultimate position of the 5′ terminus of (N)x, preferably starting at the 5′ penultimate position, and 2, 3, 4, 5, 6, 7, 8, 9, 10, 11, 12, 13 or 14 consecutive ribonucleotides starting at the ultimate or penultimate position of the 3′ terminus of (N′)y are linked by 2′-5′ internucleotide linkages.

[0172] According to various embodiments of Structure (E), 2, 3, 4, 5, 6, 7, 8, 9, 10, 11, 12, 13 or 14 consecutive nucleotides starting at the ultimate or penultimate position of the 5′ terminus of (N)x, preferably starting at the 5′ penultimate position, and 2, 3, 4, 5, 6, 7, 8, 9, 10, 11, 12, 13 or 14 consecutive nucleotides starting at the ultimate or penultimate position of the 3′ terminus of (N′)y are independently mirror nucleotides. In some embodiments the mirror is an L-ribonucleotide. In other embodiments the mirror nucleotide is L-deoxyribonucleotide.

[0173] In other embodiments of Structure (E), 2, 3, 4, 5, 6, 7, 8, 9, 10, 11, 12, 13 or 14 consecutive ribonucleotides starting at the ultimate or penultimate position of the 5′ terminus of (N)x, preferably starting at the 5′ penultimate position, and 2, 3, 4, 5, 6, 7, 8, 9, 10, 11, 12, 13 or 14 consecutive ribonucleotides starting at the ultimate or penultimate position of the 3′ terminus of (N′)y are independently 2′ sugar modified nucleotides. In some embodiments the 2′ sugar modification comprises the presence of an amino, a fluoro, an alkoxy or an alkyl moiety. In certain embodiments the 2′ sugar modification comprises a methoxy moiety (2′-OMe).

[0174] In some embodiments of Structure (E), in (N′)y 2, 3, 4, 5, 6, 7, 8, 9, 10, 11, 12, 13 or 14 consecutive ribonucleotides starting at the ultimate or penultimate position of the 5′ terminus of (N)x, preferably starting at the 5′ penultimate position, and 2, 3, 4, 5, 6, 7, 8, 9, 10, 11, 12, 13 or 14 consecutive ribonucleotides starting at the ultimate or penultimate position of the 3′ terminus of (N′)y are independently a bicyclic nucleotide. In various embodiments the bicyclic nucleotide is a locked nucleic acid (LNA) such as a 2′-O, 4′-C-ethylene-bridged nucleic acid (ENA).

[0175] In various embodiments of Structure (E), (N′)y comprises modified nucleotides selected from a bicyclic nucleotide, a 2′ sugar modified nucleotide, a mirror nucleotide, an altritol nucleotide, a nucleotide joined to an adjacent nucleotide by a P-alkoxy backbone modification or a nucleotide joined to an adjacent nucleotide by an internucleotide linkage selected from a 2′-5′ phosphodiester bond, a P-alkoxy linkage or a PACE linkage

at the 3′ terminus or at each of the 3′ and 5′ termini.

[0176] In various embodiments of Structure (E), (N)x comprises a modified nucleotide selected from a bicyclic nucleotide, a 2′ sugar modified nucleotide, a mirror nucleotide, an altritol nucleotide, or a nucleotide joined to an adjacent nucleotide by an internucleotide linkage selected from a 2′-5′ phosphodiester bond, a P-alkoxy linkage or a PACE linkage at the 5′ terminus or at each of the 3′ and 5′ termini.

[0177] In one embodiment where both 3′ and 5′ termini of the same strand comprise a modified nucleotide, the modification at the 5′ and 3′ termini is identical. In another embodiment, the modification at the 5′ terminus is different from the modification at the 3′ terminus of the same strand. In one specific embodiment, the modified nucleotides at the 5′ terminus are mirror nucleotides and the modified nucleotides at the 3′ terminus of the same strand are joined by 2′-5′ phosphodiester bond.

[0178] In various embodiments of Structure (E), the modified nucleotides in (N)x are different from the modified nucleotides in (N′)y. For example, the modified nucleotides in (N)x are 2′ sugar modified nucleotides and the modified nucleotides in (N′)y are nucleotides linked by 2′-5′ internucleotide linkages. In another example, the modified nucleotides in (N)x are mirror nucleotides and the modified nucleotides in (N′)y are nucleotides linked by 2′-5′ internucleotide linkages. In another example, the modified nucleotides in (N)x are nucleotides linked by 2′-5′ internucleotide linkages and the modified nucleotides in (N′)y are mirror nucleotides.

[0179] In additional embodiments, the present invention provides a compound having Structure (F):

| | |
|---|---|
| (F) | 5′ (N)x-Z 3′ antisense strand |
| | 3′ Z′-(N′)y 5′ sense strand |

wherein each of N and N′ is a nucleotide selected from an unmodified ribonucleotide, a modified ribonucleotide, an unmodified deoxyribonucleotide or a modified deoxyribonucleotide;
wherein each of (N)x and (N′)y is an oligomer in which each consecutive nucleotide is joined to the next nucleotide by a covalent bond and each of x and y is an integer between 18 and 40;
wherein each of (N)x and (N′)y comprise unmodified ribonucleotides in which each of (N)x and (N′)y independently comprise one modified nucleotide at the 3′ terminal or penultimate position wherein the modified nucleotide is selected from the group consisting of a bicyclic nucleotide, a 2′ sugar modified nucleotide, a mirror nucleotide, a nucleotide joined to an adjacent nucleotide by a P-alkoxy backbone modification or a nucleotide joined to an adjacent nucleotide by a 2′-5′ phosphodiester bond;
wherein in each of (N)x and (N′)y modified and unmodified nucleotides are not alternating;
wherein each of Z and Z′ may be present or absent, but if present is 1-5 deoxyribonucleotides covalently attached at the 3′ terminus of any oligomer to which it is attached;
wherein the sequence of (N′)_{y} is a sequence substantially complementary to (N)x; and wherein the sequence of (N)ₓ comprises an antisense sequence having substantial identity to about 18 to about 40 consecutive ribonucleotides in the mRNA transcribed from a gene.

[0180] In some embodiments of Structure (F), x=y=19 or x=y=23; (N′)y comprises unmodified ribonucleotides in which two consecutive nucleotides at the 3′ terminus comprises two consecutive mirror deoxyribonucleotides; and (N)x comprises unmodified ribonucleotides in which one nucleotide at the 3′ terminus comprises a mirror deoxyribonucleotide (set forth as Structure III).

[0181] According to various embodiments of Structure (F) 2, 3, 4, 5, 6, 7, 8, 9, 10, 11, 12, 13 or 14 consecutive ribonucleotides independently beginning at the ultimate or penultimate position of the 3′ termini of (N)x and (N′)y are linked by 2′-5′ internucleotide linkages.

[0182] According to one preferred embodiment of Structure (F), three consecutive nucleotides at the 3′ terminus of (N′)y are joined by two 2′-5′ phosphodiester bonds and three consecutive nucleotides at the 3′ terminus of (N′)x are joined by two 2′-5′ phosphodiester bonds.

[0183] According to various embodiments of Structure (F), 2, 3, 4, 5, 6, 7, 8, 9, 10, 11, 12, 13 or 14 consecutive nucleotides independently beginning at the ultimate or penultimate position of the 3′ termini of (N)x and (N′)y are independently mirror nucleotides. In some embodiments the mirror nucleotide is an L-ribonucleotide. In other embodiments the mirror nucleotide is an L-deoxyribonucleotide.

[0184] In other embodiments of Structure (F), 2, 3, 4, 5, 6, 7, 8, 9, 10, 11, 12, 13 or 14 consecutive ribonucleotides independently beginning at the ultimate or penultimate position of the 3′ termini of (N)x and (N′)y are independently 2′ sugar modified nucleotides. In some embodiments the 2′ sugar modification comprises the presence of an amino, a fluoro, an alkoxy or an alkyl moiety. In certain embodiments the 2′ sugar modification comprises a methoxy moiety (2′-OMe).

[0185] In some embodiments of Structure (F), 2, 3, 4, 5, 6, 7, 8, 9, 10, 11, 12, 13 or 14 consecutive ribonucleotides independently beginning at the ultimate or penultimate position of the 3′ termini of (N)x and (N′)y are independently a bicyclic nucleotide. In various embodiments the bicyclic nucleotide is a locked nucleic acid (LNA) such as a 2′-O, 4′-C-ethylene-bridged nucleic acid (ENA).

[0186] In various embodiments of Structure (F), (N′)y comprises a modified nucleotide selected from a bicyclic nucleotide, a 2′ sugar modified nucleotide, a mirror nucleotide, an altritol nucleotide, or a nucleotide joined to an adjacent nucleotide by an internucleotide linkage selected from a 2′-5′ phosphodiester bond, a P-alkoxy linkage or a PACE linkage at the 3′ terminus or at both the 3′ and 5′ termini.

[0187] In various embodiments of Structure (F), (N)x comprises a modified nucleotide selected from a bicyclic nucleotide, a 2′ sugar modified nucleotide, a mirror nucleotide, an altritol nucleotide, or a nucleotide joined to an adjacent nucleotide by an internucleotide linkage selected from a 2′-5′ phosphodiester bond, a P-alkoxy linkage or a PACE linkage at the 3′ terminus or at each of the 3′ and 5′ termini.

[0188] In one embodiment where each of 3′ and 5′ termini of the same strand comprise a modified nucleotide, the modification at the 5′ and 3′ termini is identical. In another embodiment, the modification at the 5′ terminus is different from the modification at the 3′ terminus of the same strand. In one specific embodiment, the modified nucleotides at the 5′ terminus are mirror nucleotides and the modified nucleotides at the 3′ terminus of the same strand are joined by 2′-5′ phosphodiester bond.

[0189] In various embodiments of Structure (F), the modified nucleotides in (N)x are different from the modified nucleotides in (N′)y. For example, the modified nucleotides in (N)x are 2′ sugar modified nucleotides and the modified nucleotides in (N′)y are nucleotides linked by 2′-5′ internucleotide linkages. In another example, the modified nucleotides in (N)x are mirror nucleotides and the modified nucleotides in (N′)y are nucleotides linked by 2′-5′ internucleotide linkages. In another example, the modified nucleotides in (N)x are nucleotides linked by 2′-5′ internucleotide linkages and the modified nucleotides in (N′)y are mirror nucleotides.

[0190] In additional embodiments, the present invention provides a compound having Structure (G):

| | |
|---|---|
| (G) | 5′ (N)x-Z 3′ antisense strand |
| | 3′ Z′-(N′)y 5' sense strand |

wherein each of N and N′ is a nucleotide selected from an unmodified ribonucleotide, a modified ribonucleotide, an unmodified deoxyribonucleotide or a modified deoxyribonucleotide;
wherein each of (N)x and (N′)y is an oligomer in which each consecutive nucleotide is joined to the next nucleotide by a covalent bond and each of x and y is an integer between 18 and 40;
wherein each of (N)x and (N′)y comprise unmodified ribonucleotides in which each of (N)x and (N′)y independently comprise one modified nucleotide at the 5′ terminal or penultimate position wherein the modified nucleotide is selected from the group consisting of a bicyclic nucleotide, a 2′ sugar modified nucleotide, a mirror nucleotide, a nucleotide joined to an adjacent nucleotide by a P-alkoxy backbone modification or a nucleotide joined to an adjacent nucleotide by a 2′-5′ phosphodiester bond;
wherein for (N)x the modified nucleotide is preferably at penultimate position of the 5′ terminal;
wherein in each of (N)x and (N′)y modified and unmodified nucleotides are not alternating;
wherein each of Z and Z′ may be present or absent, but if present is 1-5 deoxyribonucleotides covalently attached at the 3′ terminus of any oligomer to which it is attached;
wherein the sequence of (N′)_{y} is a sequence substantially complementary to (N)x; and wherein the sequence of (N)ₓ comprises an antisense sequence having substantial identity to about 18 to about 40 consecutive ribonucleotides in the mRNA transcribed from a gene.

[0191] In some embodiments of Structure (G), x=y=19 or x=y=23.

[0192] According to various embodiments of Structure (G) 2, 3, 4, 5, 6, 7, 8, 9, 10, 11, 12, 13 or 14 consecutive ribonucleotides independently beginning at the ultimate or penultimate position of the 5′ termini of (N)x and (N′)y are linked by 2′-5′ internucleotide linkages. For (N)x the modified nucleotides preferably starting at the penultimate position of the 5′ terminal.

[0193] According to various embodiments of Structure (G), 2, 3, 4, 5, 6, 7, 8, 9, 10, 11, 12, 13 or 14 consecutive nucleotides independently beginning at the ultimate or penultimate position of the 5′ termini of (N)x and (N′)y are independently mirror nucleotides. In some embodiments the mirror nucleotide is an L-ribonucleotide. In other embodiments the mirror nucleotide is an L-deoxyribonucleotide. For (N)x the modified nucleotides preferably starting at the penultimate position of the 5′ terminal.

[0194] In other embodiments of Structure (G), 2, 3, 4, 5, 6, 7, 8, 9, 10, 11, 12, 13 or 14 consecutive ribonucleotides independently beginning at the ultimate or penultimate position of the 5′ termini of (N)x and (N′)y are independently 2′ sugar modified nucleotides. In some embodiments the 2′ sugar modification comprises the presence of an amino, a fluoro, an alkoxy or an alkyl moiety. In certain embodiments the 2′ sugar modification comprises a methoxy moiety (2′-OMe). In some preferred embodiments the consecutive modified nucleotides preferably begin at the penultimate position of the 5′ terminus of (N)x.

[0195] In one preferred embodiment of Structure (G), five consecutive ribonucleotides at the 5′ terminus of (N′)y comprise a 2′-O-methyl modification and one ribonucleotide at the 5′ penultimate position of (N′)x comprises a 2′-O-methyl modification. In another preferred embodiment of Structure (G), five consecutive ribonucleotides at the 5′ terminus of (N′)y comprise a 2′-O-methyl modification and two consecutive ribonucleotides at the 5′ terminal position of (N′)x comprise a 2′-O-methyl modification.

[0196] In some embodiments of Structure (G), 2, 3, 4, 5, 6, 7, 8, 9, 10, 11, 12, 13 or 14 consecutive ribonucleotides independently beginning at the ultimate or penultimate position of the 5′ termini of (N)x and (N′)y are bicyclic nucleotides. In various embodiments the bicyclic nucleotide is a locked nucleic acid (LNA) such as a 2′-O, 4′-C-ethylene-bridged nucleic acid (ENA). In some preferred embodiments the consecutive modified nucleotides preferably begin at the penultimate position of the 5′ terminus of (N)x.

[0197] In various embodiments of Structure (G), (N′)y comprises a modified nucleotide selected from a bicyclic nucleotide, a 2′ sugar modified nucleotide, a mirror nucleotide, an altritol nucleotide, or a nucleotide joined to an adjacent nucleotide by an internucleotide linkage selected from a 2′-5′ phosphodiester bond, a P-alkoxy linkage or a PACE linkage at the 5′ terminus or at each of the 3′ and 5′ termini.

[0198] In various embodiments of Structure (G), (N)x comprises a modified nucleotide selected from a bicyclic nucleotide, a 2′ sugar modified nucleotide, a mirror nucleotide, an altritol nucleotide, or a nucleotide joined to an adjacent nucleotide by an internucleotide linkage selected from a 2′-5′ phosphodiester bond, a P-alkoxy linkage or a PACE linkage at the 5′ terminus or at each of the 3′ and 5′ termini.

[0199] In one embodiment where each of 3′ and 5′ termini of the same strand comprise a modified nucleotide, the modification at the 5′ and 3′ termini is identical. In another embodiment, the modification at the 5′ terminus is different from the modification at the 3′ terminus of the same strand. In one specific embodiment, the modified nucleotides at the 5′ terminus are mirror nucleotides and the modified nucleotides at the 3′ terminus of the same strand are joined by 2′-5′ phosphodiester bond. In various embodiments of Structure (G), the modified nucleotides in (N)x are different from the modified nucleotides in (N′)y. For example, the modified nucleotides in (N)x are 2′ sugar modified nucleotides and the modified nucleotides in (N′)y are nucleotides linked by 2′-5′ internucleotide linkages. In another example, the modified nucleotides in (N)x are mirror nucleotides and the modified nucleotides in (N′)y are nucleotides linked by 2′-5′ internucleotide linkages. In another example, the modified nucleotides in (N)x are nucleotides linked by 2′-5′ internucleotide linkages and the modified nucleotides in (N′)y are mirror nucleotides.

[0200] In additional embodiments, the present invention provides a compound having Structure (H):

| | |
|---|---|
| (H) | 5′ (N)x-Z 3′ antisense strand |
| | 3′ Z′-(N′)y 5′ sense strand |

wherein each of N and N′ is a nucleotide selected from an unmodified ribonucleotide, a modified ribonucleotide, an unmodified deoxyribonucleotide or a modified deoxyribonucleotide;
wherein each of (N)x and (N′)y is an oligomer in which each consecutive nucleotide is joined to the next nucleotide by a covalent bond and each of x and y is an integer between 18 and 40;
wherein (N)x comprises unmodified ribonucleotides further comprising one modified nucleotide at the 3′ terminal or penultimate position or the 5′ terminal or penultimate position, wherein the modified nucleotide is selected from the group consisting of a bicyclic nucleotide, a 2′ sugar modified nucleotide, a mirror nucleotide, an altritol nucleotide, or a nucleotide joined to an adjacent nucleotide by an internucleotide linkage selected from a 2′-5′ phosphodiester bond, a P-alkoxy linkage or a PACE linkage;
wherein (N′)y comprises unmodified ribonucleotides further comprising one modified nucleotide at an internal position, wherein the modified nucleotide is selected from the group consisting of a bicyclic nucleotide, a 2′ sugar modified nucleotide, a mirror nucleotide, an altritol nucleotide, or a nucleotide joined to an adjacent nucleotide by an internucleotide linkage selected from a 2′-5′ phosphodiester bond, a P-alkoxy linkage or a PACE linkage;
wherein in each of (N)x and (N′)y modified and unmodified nucleotides are not alternating;
wherein each of Z and Z′ may be present or absent, but if present is 1-5 deoxyribonucleotides covalently attached at the 3′ terminus of any oligomer to which it is attached;
wherein the sequence of (N′)_{y} is a sequence substantially complementary to (N)x; and wherein the sequence of (N)ₓ comprises an antisense sequence having substantial identity to about 18 to about 40 consecutive ribonucleotides in the mRNA transcribed from a gene.

[0201] In one embodiment of Structure (H), 2, 3, 4, 5, 6, 7, 8, 9, 10, 11, 12, 13 or 14 consecutive ribonucleotides independently beginning at the ultimate or penultimate position of the 3′ terminus or the 5′ terminus or both termini of (N)x are independently 2′ sugar modified nucleotides, bicyclic nucleotides, mirror nucleotides, altritol nucleotides or nucleotides joined to an adjacent nucleotide by a 2′-5′ phosphodiester bond and 2, 3, 4, 5, 6, 7, 8, 9, 10, 11, 12, 13 or 14 consecutive internal ribonucleotides in (N′)y are independently 2′ sugar modified nucleotides, bicyclic nucleotides, mirror nucleotides, altritol nucleotides or nucleotides joined to an adjacent nucleotide by a 2′-5′ phosphodiester bond. In some embodiments the 2′ sugar modification comprises the presence of an amino, a fluoro, an alkoxy or an alkyl moiety. In certain embodiments the 2′ sugar modification comprises a methoxy moiety (2′-OMe).

[0202] In another embodiment of Structure (H), 2, 3, 4, 5, 6, 7, 8, 9, 10, 11, 12, 13 or 14 consecutive ribonucleotides independently beginning at the ultimate or penultimate position of the 3′ terminus or the 5′ terminus or 2-8 consecutive nucleotides at each of 5′ and 3′ termini of (N′)y are independently 2′ sugar modified nucleotides, bicyclic nucleotides, mirror nucleotides, altritol nucleotides or nucleotides joined to an adjacent nucleotide by a 2′-5′ phosphodiester bond, and 2, 3, 4, 5, 6, 7, 8, 9, 10, 11, 12, 13 or 14 consecutive internal ribonucleotides in (N)x are independently 2′ sugar modified nucleotides, bicyclic nucleotides, mirror nucleotides, altritol nucleotides or nucleotides joined to an adjacent nucleotide by a 2′-5′ phosphodiester bond.

[0203] In one embodiment wherein each of 3′ and 5′ termini of the same strand comprises a modified nucleotide, the modification at the 5′ and 3′ termini is identical. In another embodiment, the modification at the 5′ terminus is different from the modification at the 3′ terminus of the same strand. In one specific embodiment, the modified nucleotides at the 5′ terminus are mirror nucleotides and the modified nucleotides at the 3′ terminus of the same strand are joined by 2′-5′ phosphodiester bond.

[0204] In various embodiments of Structure (H), the modified nucleotides in (N)x are different from the modified nucleotides in (N′)y. For example, the modified nucleotides in (N)x are 2′ sugar modified nucleotides and the modified nucleotides in (N′)y are nucleotides linked by 2′-5′ internucleotide linkages. In another example, the modified nucleotides in (N)x are mirror nucleotides and the modified nucleotides in (N′)y are nucleotides linked by 2′-5′ internucleotide linkages. In another example, the modified nucleotides in (N)x are nucleotides linked by 2′-5′ internucleotide linkages and the modified nucleotides in (N′)y are mirror nucleotides.

[0205] In one preferred embodiment of Structure (H), x=y=19; three consecutive ribonucleotides at the 9-11 nucleotide positions 9-11 of (N′)y comprise 2′-O-methyl modification and five consecutive ribonucleotides at the 3′ terminal position of (N′)x comprise 2′-O-methyl modification.

[0206] For all the above Structures (A)-(H), in various embodiments x=y and each of x and y is 19, 20, 21, 22 or 23. In certain embodiments, x=y=19. In yet other embodiments x=y=23. In additional embodiments the compound comprises 2′ modified ribonucleotides in alternating positions wherein each N at the 5′ and 3′ termini of (N)x are modified in their sugar residues and the middle ribonucleotide is not modified, e.g. ribonucleotide in position 10 in a 19-mer strand, position 11 in a 21 mer and position 12 in a 23-mer strand.

[0207] In some embodiments where x=y=21 or x=y=23 the position of modifications in the 19 mer are adjusted for the 21 and 23 mers with the proviso that the middle nucleotide of the antisense strand is preferably not modified.

[0208] In some embodiments, neither (N)x nor (N′)y are phosphorylated at the 3′ and 5′ termini. In other embodiments either or both (N)x and (N′)y are phosphorylated at the 3′ termini. In yet another embodiment, either or both (N)x and (N′)y are phosphorylated at the 3′ termini using non-cleavable phosphate groups. In yet another embodiment, either or both (N)x and (N′)y are phosphorylated at the terminal 2′ termini position using cleavable or non-cleavable phosphate groups. These particular siRNA compounds are also blunt ended and are non-phosphorylated at the termini; however, comparative experiments have shown that siRNA compounds phosphorylated at one or both of the 3′-termini have similar activity in vivo compared to the non-phosphorylated compounds.

[0209] In certain embodiments for all the above-mentioned Structures, the compound is blunt ended, for example wherein both Z and Z′ are absent. In an alternative embodiment, the compound comprises at least one 3′ overhang, wherein at least one of Z or Z′ is present. Z and Z′ independently comprises one or more covalently linked modified or non-modified nucleotides, for example inverted dT or dA; dT, LNA, mirror nucleotide and the like. In some embodiments each of Z and Z′ are independently selected from dT and dTdT. siRNA in which Z and/or Z′ is present have similar in vitro and or in vivo activity and stability as siRNA in which Z and Z′ are absent.

[0210] In certain embodiments for all the above-mentioned Structures, the compound comprises one or more phosphonocarboxylate and/or phosphinocarboxylate nucleotides (PACE nucleotides). In some embodiments the PACE nucleotides are deoxyribonucleotides and the phosphinocarboxylate nucleotides are phosphinoacetate nucleotides. Examples of PACE nucleotides and analogs are disclosed in U.S. Pat. Nos. 6,693,187 and 7,067,641, both incorporated herein by reference.

[0211] In certain embodiments for all the above-mentioned Structures, the compound comprises one or more locked nucleic acids (LNA) also defined as bridged nucleic acids or bicyclic nucleotides. Preferred locked nucleic acids are 2′-O, 4′-C-ethylene nucleosides (ENA) or 2′-O, 4′-C-methylene nucleosides. Other examples of LNA and ENA nucleotides are disclosed in WO 98/39352, WO 00/47599 and WO 99/14226, all incorporated herein by reference.

[0212] In certain embodiments for all the above-mentioned Structures, the compound comprises one or more altritol monomers (nucleotides), also defined as 1,5 anhydro-2-deoxy-D-altrito-hexitol (see for example, Allart, et al., 1998. Nucleosides & Nucleotides 17:1523-1526; Herdewijn et al., 1999. Nucleosides & Nucleotides 18:1371-1376; Fisher et al., 2007, NAR 35(4):1064-1074; all incorporated herein by reference).

[0213] The present invention explicitly excludes compounds in which each of N and/or N′ is a deoxyribonucleotide (D-A, D-C, D-G, D-T). In certain embodiments (N)x and (N′)y may comprise independently 1, 2, 3, 4, 5, 6, 7, 8, 9 or more deoxyribonucleotides. In certain embodiments the present invention provides a compound wherein each of N is an unmodified ribonucleotide and the 3′ terminal nucleotide or 2, 3, 4, 5, 6, 7, 8, 9, 10, 11, 12, 13 or 14 consecutive nucleotides at the 3′ terminus of (N′)y are deoxyribonucleotides. In yet other embodiments each of N is an unmodified ribonucleotide and the 5′ terminal nucleotide or 2, 3, 4, 5, 6, 7, 8, 9, 10, 11, 12, 13 or 14 consecutive nucleotides at the 5′ terminus of (N′)y are deoxyribonucleotides. In further embodiments the 5′ terminal nucleotide or 2, 3, 4, 5, 6, 7, 8, or 9 consecutive nucleotides at the 5′ terminus and 1, 2, 3, 4, 5, or 6 consecutive nucleotides at the 3′ termini of (N)x are deoxyribonucleotides and each of N′ is an unmodified ribonucleotide. In yet further embodiments (N)x comprises unmodified ribonucleotides and 1 or 2, 3 or 4 consecutive deoxyribonucleotides independently at each of the 5′ and 3′ termini and 1 or 2, 3, 4, 5 or 6 consecutive deoxyribonucleotides in internal positions; and each of N′ is an unmodified ribonucleotide. In certain embodiments the 3′ terminal nucleotide or 2, 3, 4, 5, 6, 7, 8, 9, 10, 11, 12 13 or 14 consecutive nucleotides at the 3′ terminus of (N′)y and the terminal 5′ nucleotide or 2, 3, 4, 5, 6, 7, 8, 9, 10, 11, 12 13 or 14 consecutive nucleotides at the 5′ terminus of (N)x are deoxyribonucleotides. The present invention excludes compounds in which each of N and/or N′ is a deoxyribonucleotide. In some embodiments the 5′ terminal nucleotide of N or 2 or 3 consecutive of N and 1,2, or 3 of N′ is a deoxyribonucleotide. Certain examples of active DNA/RNA siRNA chimeras are disclosed in US patent publication 2005/0004064, and Ui-Tei, 2008 (NAR 36(7):2136-2151) incorporated herein by reference in their entirety.

[0214] Unless otherwise indicated, in preferred embodiments of the structures discussed herein the covalent bond between each consecutive N or N′ is a phosphodiester bond.

[0215] An additional novel molecule provided by the present invention is an oligonucleotide comprising consecutive nucleotides wherein a first segment of such nucleotides encode a first inhibitory RNA molecule, a second segment of such nucleotides encode a second inhibitory RNA molecule, and a third segment of such nucleotides encode a third inhibitory RNA molecule. Each of the first, the second and the third segment may comprise one strand of a double stranded RNA and the first, second and third segments may be joined together by a linker. Further, the oligonucleotide may comprise three double stranded segments joined together by one or more linker.

[0216] Thus, one molecule provided by the present invention is an oligonucleotide comprising consecutive nucleotides which encode three inhibitory RNA molecules; said oligonucleotide may possess a triple stranded structure, such that three double stranded arms are linked together by one or more linker, such as any of the linkers presented hereinabove. This molecule forms a “star”-like structure, and may also be referred to herein as RNAstar. Such structures are disclosed in PCT patent publication WO 2007/091269, assigned to the assignee of the present invention and hereby incorporated by reference in its entirety.

[0217] A covalent bond refers to an internucleotide linkage linking one nucleotide monomer to an adjacent nucleotide monomer. A covalent bond includes for example, a phosphodiester bond, a phosphorothioate bond, a P-alkoxy bond, a P-carboxy bond and the like. The normal internucleoside linkage of RNA and DNA is a 3′ to 5′ phosphodiester linkage. In certain preferred embodiments a covalent bond is a phosphodiester bond. Covalent bond encompasses non-phosphorous-containing internucleoside linkages, such as those disclosed in WO 2004/041924 inter alia. Unless otherwise indicated, in preferred embodiments of the structures discussed herein the covalent bond between each consecutive N or N′ is a phosphodiester bond.

[0218] For all of the structures above, in some embodiments the oligonucleotide sequence of (N)x is fully complementary to the oligonucleotide sequence of (N′)y. In other embodiments (N)x and (N′)y are substantially complementary. In certain embodiments (N)x is fully complementary to a target sequence. In other embodiments (N)x is substantially complementary to a target sequence.

[0219] In some embodiments, neither (N)x nor (N′)y are phosphorylated at the 3′ and 5′ termini. In other embodiments either or both (N)x and (N′)y are phosphorylated at the 3′ termini (3′ Pi). In yet another embodiment, either or both (N)x and (N′)y are phosphorylated at the 3′ termini with non-cleavable phosphate groups. In yet another embodiment, either or both (N)x and (N′)y are phosphorylated at the terminal 2′ termini position using cleavable or non-cleavable phosphate groups. Further, the inhibitory nucleic acid molecules of the present invention may comprise one or more gaps and/or one or more nicks and/or one or more mismatches. Without wishing to be bound by theory, gaps, nicks and mismatches have the advantage of partially destabilizing the nucleic acid/siRNA, so that it may be more easily processed by endogenous cellular machinery such as DICER, DROSHA or RISC into its inhibitory components.

[0220] In the context of the present invention, a gap in a nucleic acid refers to the absence of one or more internal nucleotides in one strand, while a nick in a nucleic acid refers to the absence of an internucleotide linkage between two adjacent nucleotides in one strand. Any of the molecules of the present invention may contain one or more gaps and/or one or more nicks.

[0221] In additional embodiments the present invention provides a compound having Structure (I) set forth below:

| | |
|---|---|
| (I) | 5′ (N)x-Z 3′ (antisense strand) |
| | 3′ Z′-(N′)y-z″ 5′ (sense strand) |

wherein each of N and N′ is a ribonucleotide which may be unmodified or modified, or an unconventional moiety;
wherein each of (N)x and (N′)y is an oligonucleotide in which each consecutive N or N′ is joined to the next N or N′ by a covalent bond;
wherein Z and Z′ may be present or absent, but if present is independently 1-5 consecutive nucleotides covalently attached at the 3′ terminus of the strand in which it is present;
wherein z″ may be present or absent, but if present is a capping moiety covalently attached at the 5′ terminus of (N′)y;
wherein each of x and y are independently 18 to 27;
wherein (N)x comprises modified and unmodified ribonucleotides, each modified ribonucleotide having a 2′-O-methyl on its sugar, wherein N at the 3′ terminus of (N)x is a modified ribonucleotide, (N)x comprises at least five alternating modified ribonucleotides beginning at the 3′ end and at least nine modified ribonucleotides in total and each remaining N is an unmodified ribonucleotide;
wherein in (N′)y at least one unconventional moiety is present, which unconventional moiety may be an abasic ribose moiety, an abasic deoxyribose moiety, a modified or unmodified deoxyribonucleotide, a mirror nucleotide, and a nucleotide joined to an adjacent nucleotide by a 2′-5′ internucleotide phosphate bond; and
wherein the sequence of (N)x is substantially complementary to the sequence of (N′)y; and the sequence of (N′)y is substantially identical to the sequence of an mRNA encoded by a target gene.

[0222] In some embodiments x=y=19. In other embodiments x=y=23. In some embodiments the at least one unconventional moiety is present at positions 15, 16, 17, or 18 in (N′)y. In some embodiments the unconventional moiety is selected from a mirror nucleotide, an abasic ribose moiety and an abasic deoxyribose moiety. In some preferred embodiments the unconventional moiety is a mirror nucleotide, preferably an L-DNA moiety. In some embodiments an L-DNA moiety is present at position 17, position 18 or positions 17 and 18.

[0223] In other embodiments the unconventional moiety is an abasic moiety. In various embodiments (N′)y comprises at least five abasic ribose moieties or abasic deoxyribose moieties.

[0224] In yet other embodiments (N′)y comprises at least five abasic ribose moieties or abasic deoxyribose moieties and at least one of N′ is an LNA.

[0225] In some embodiments (N)x comprises nine alternating modified ribonucleotides. In other embodiments of Structure (I) (N)x comprises nine alternating modified ribonucleotides further comprising a 2′O modified nucleotide at position 2. In some embodiments (N)x comprises 2′O Me modified ribonucleotides at the odd numbered positions 1, 3, 5, 7, 9, 11, 13, 15, 17, 19. In other embodiments (N)x further comprises a 2′O Me modified ribonucleotide at one or both of positions 2 and 18. In yet other embodiments (N)x comprises 2′O Me modified ribonucleotides at positions 2, 4, 6, 8, 11, 13, 15, 17, 19.

[0226] In various embodiments z″ is present and is selected from an abasic ribose moiety, a deoxyribose moiety; an inverted abasic ribose moiety, a deoxyribose moiety; C6-amino-Pi; a mirror nucleotide.

[0227] In another aspect the present invention provides a compound having Structure (J) set forth below:

| | |
|---|---|
| (J) | 5′ (N)x-Z 3′ (antisense strand) |
| | 3′ Z′-(N′)y-z″ 5′ (sense strand) |

wherein each of N and N′ is a ribonucleotide which may be unmodified or modified, or an unconventional moiety;
wherein each of (N)x and (N′)y is an oligonucleotide in which each consecutive N or N′ is joined to the next N or N′ by a covalent bond;
wherein Z and Z′ may be present or absent, but if present is independently 1-5 consecutive nucleotides covalently attached at the 3′ terminus of the strand in which it is present;
wherein z″ may be present or absent but if present is a capping moiety covalently attached at the 5′ terminus of (N′)y;
wherein each of x and y are independently 18 to 27;
wherein (N)x comprises modified or unmodified ribonucleotides, and optionally at least one unconventional moiety;
wherein in (N′)y at least one unconventional moiety is present, which unconventional moiety may be an abasic ribose moiety, an abasic deoxyribose moiety, a modified or unmodified deoxyribonucleotide, a mirror nucleotide, a non-base pairing nucleotide analog or a nucleotide joined to an adjacent nucleotide by a 2′-5′ internucleotide phosphate bond; and
wherein the sequence of (N)x is substantially complementary to the sequence of (N′)y; and the sequence of (N′)y is substantially identical to the sequence of an mRNA encoded by a target gene.

[0228] In some embodiments x=y=19. In other embodiments x=y=23. In some preferred embodiments (N)x comprises modified and unmodified ribonucleotides, and at least one unconventional moiety.

[0229] In some embodiments in (N)x the N at the 3′ terminus is a modified ribonucleotide and (N)x comprises at least 8 modified ribonucleotides. In other embodiments at least 5 of the at least 8 modified ribonucleotides are alternating beginning at the 3′ end. In some embodiments (N)x comprises an abasic moiety in one of positions 5, 6, 7, 8, 9, 10, 11, 12, 13, 14 or 15.

[0230] In some embodiments the at least one unconventional moiety in (N′)y is present at positions 15, 16, 17, or 18. In some embodiments the unconventional moiety is selected from a mirror nucleotide, an abasic ribose moiety and an abasic deoxyribose moiety. In some preferred embodiments the unconventional moiety is a mirror nucleotide, preferably an L-DNA moiety. In some embodiments an L-DNA moiety is present at position 17, position 18 or positions 17 and 18. In other embodiments the at least one unconventional moiety in (N′)y is an abasic ribose moiety or an abasic deoxyribose moiety.

[0231] In various embodiments of Structure (X) z″ is present and is selected from an abasic ribose moiety, a deoxyribose moiety; an inverted abasic ribose moiety, a deoxyribose moiety; C6-amino-Pi; a mirror nucleotide.

[0232] In yet another aspect the present invention provides a compound having Structure (K) set forth below:

| | |
|---|---|
| (K) | 5′ (N)ₓ-Z 3′ (antisense strand) |
| | 3′ Z′-(N′)_{y}-z″ 5′ (sense strand) |

wherein each of N and N′ is a ribonucleotide which may be unmodified or modified, or an unconventional moiety;
wherein each of (N)x and (N′)y is an oligonucleotide in which each consecutive N or N′ is joined to the next N or N′ by a covalent bond;
wherein Z and Z′ may be present or absent, but if present is independently 1-5 consecutive nucleotides covalently attached at the 3′ terminus of the strand in which it is present;
wherein z″ may be present or absent but if present is a capping moiety covalently attached at the 5′ terminus of (N′)y;
wherein each of x and y are independently 18 to 27;
wherein (N)x comprises a combination of modified or unmodified ribonucleotides and unconventional moieties, any modified ribonucleotide having a 2′-O-methyl on its sugar;
wherein (N′)y comprises modified or unmodified ribonucleotides and optionally an unconventional moiety, any modified ribonucleotide having a 2′OMe on its sugar;
wherein the sequence of (N)x is substantially complementary to the sequence of (N′)y; and the sequence of (N′)y is substantially identical to the sequence of an mRNA encoded by a target gene; and wherein there are less than 15 consecutive nucleotides complementary to the mRNA.

[0233] In some embodiments x=y=19. In other embodiments x=y=23. In some preferred embodiments the at least one preferred one unconventional moiety is present in (N)x and is an abasic ribose moiety or an abasic deoxyribose moiety. In other embodiments the at least one unconventional moiety is present in (N)x and is a non-base pairing nucleotide analog. In various embodiments (N′)y comprises unmodified ribonucleotides. In some embodiments (N)x comprises at least five abasic ribose moieties or abasic deoxyribose moieties or a combination thereof. In certain embodiments (N)x and/or (N′)y comprise modified ribonucleotides which do not base pair with corresponding modified or unmodified ribonucleotides in (N′)y and/or (N)x.

[0234] In various embodiments the present invention provides an siRNA set forth in Structure (L):

| | |
|---|---|
| (L) | 5′ (N)ₓ-Z 3′ (antisense strand) |
| | 3′ Z'-(N′)_{y} 5′ (sense strand) |

wherein each of N and N′ is a nucleotide selected from an unmodified ribonucleotide, a modified ribonucleotide, an unmodified deoxyribonucleotide and a modified deoxyribonucleotide;
wherein each of (N)ₓ and (N′)_{y} is an oligonucleotide in which each consecutive N or N′ is joined to the next N or N′ by a covalent bond;
wherein Z and Z′ are absent;
wherein x=y=19;
wherein in (N′)y the nucleotide in at least one of positions 15, 16, 17, 18 and 19 comprises a nucleotide selected from an abasic pseudo-nucleotide, a mirror nucleotide, a deoxyribonucleotide and a nucleotide joined to an adjacent nucleotide by a 2′-5′ internucleotide bond;
wherein (N)x comprises alternating modified ribonucleotides and unmodified ribonucleotides each modified ribonucleotide being modified so as to have a 2′-O-methyl on its sugar and the ribonucleotide located at the middle position of (N)x being modified or unmodified, preferably unmodified; and
wherein the sequence of (N)x is substantially complementary to the sequence of (N′)y; and the sequence of (N′)y is substantially identical to the mRNA of a target gene.

[0235] In some embodiments of Structure (L), in (N′)y the nucleotide in one or both of positions 17 and 18 comprises a modified nucleotide selected from an abasic pseudo-nucleotide, a mirror nucleotide and a nucleotide joined to an adjacent nucleotide by a 2′-5′ internucleotide bond. In some embodiments the mirror nucleotide is selected from L-DNA and L-RNA. In various embodiments the mirror nucleotide is L-DNA.

[0236] In various embodiments (N′)y comprises a modified nucleotide at position 15 wherein the modified nucleotide is selected from a mirror nucleotide and a deoxyribonucleotide.

[0237] In certain embodiments (N′)y further comprises a modified nucleotide or pseudo nucleotide at position 2 wherein the pseudo nucleotide may be an abasic pseudo-nucleotide analog and the modified nucleotide is optionally a mirror nucleotide.

[0238] In various embodiments the antisense strand (N)x comprises 2′O-Me modified ribonucleotides at the odd numbered positions (5′ to 3′; positions 1, 3, 5, 7, 9, 11, 13, 15, 17, 19). In some embodiments (N)x further comprises 2′O-Me modified ribonucleotides at one or both positions 2 and 18. In other embodiments (N)x comprises 2′O Me modified ribonucleotides at positions 2, 4, 6, 8, 11, 13, 15, 17, 19.

[0239] Other embodiments of the Structures above are envisaged wherein x=y=21 or wherein x=y=23; in these embodiments the modifications for (N′)y discussed above instead of being in positions 17 and 18 are in positions 19 and 20 for 21-mer oligonucleotide and 21 and 22 for 23 mer oligonucleotide; similarly the modifications in positions 15, 16, 17, 18 or 19 are in positions 17, 18, 19, 20 or 21 for the 21-mer oligonucleotide and positions 19, 20, 21, 22, or 23 for the 23-mer oligonucleotide. The 2′O Me modifications on the antisense strand are similarly adjusted. In some embodiments (N)x comprises 2′O Me modified ribonucleotides at the odd numbered positions (5′ to 3′; positions 1, 3, 5, 7, 9, 12, 14, 16, 18, 20 for the 21 mer oligonucleotide [nucleotide at position 11 unmodified] and 1, 3, 5, 7, 9, 11, 13, 15, 17, 19, 21, 23 for the 23 mer oligonucleotide [nucleotide at position 12 unmodified]. In other embodiments (N)x comprises 2′O Me modified ribonucleotides at positions 2, 4, 6, 8, 10, 12, 14, 16, 18, 20 [nucleotide at position 11 unmodified for the 21 mer oligonucleotide and at positions 2, 4, 6, 8, 10, 13, 15, 17, 19, 21, 23 for the 23 mer oligonucleotide [nucleotide at position 12 unmodified]. In some embodiments (N′)y further comprises a 5′ terminal cap nucleotide. In various embodiments the terminal cap moiety is selected from an abasic pseudo-nucleotide analog, an inverted abasic pseudo-nucleotide analog, an L-DNA nucleotide, and a C6-imine phosphate.

[0240] In other embodiments the present invention provides a compound having Structure (M) set forth below:

5′ (N)ₓ-Z 3′ (antisense strand)
3′ Z′-(N′)_{y} 5′ (sense strand)

wherein each of N and N′ is selected from a pseudo-nucleotide and a nucleotide;
wherein each nucleotide is selected from an unmodified ribonucleotide, a modified ribonucleotide, an unmodified deoxyribonucleotide and a modified deoxyribonucleotide;
wherein each of (N)ₓ and (N′)_{y} is an oligonucleotide in which each consecutive N or N′ is joined to the next N or N′ by a covalent bond;
wherein Z and Z′ are absent;
wherein each of x and y are independently 18 to 27;
wherein the sequence of (N)x is substantially complementary to the sequence of (N′)y; and the sequence of (N′)y is substantially identical to the mRNA of a target gene;
wherein at least one of N is selected from an abasic pseudo nucleotide, a non-pairing nucleotide analog and a nucleotide mismatch to the mRNA of a target gene in a position of (N)x such that (N)x comprises less than 15 consecutive nucleotides complementary to the mRNA of a target gene.

[0241] In other embodiments the present invention provides a double stranded compound having Structure (N) set forth below:

| | |
|---|---|
| (N) | 5′ (N)ₓ-Z 3′ (antisense strand) |
| | 3′ Z′-(N′)_{y} 5′ (sense strand) |

wherein each of N and N′ is a nucleotide selected from an unmodified ribonucleotide, a modified ribonucleotide, an unmodified deoxyribonucleotide and a modified deoxyribonucleotide;
wherein each of (N)ₓ and (N′)_{y} is an oligonucleotide in which each consecutive N or N′ is joined to the next N or N′ by a covalent bond;
wherein Z and Z′ are absent;
wherein each of x and y is an integer between 18 and 40;
wherein the sequence of (N)x is substantially complementary to the sequence of (N′)y; and the sequence of (N′)y is substantially identical to the mRNA of a target gene;
wherein (N)x, (N′)y or (N)x and (N′)y comprise non base-pairing modified nucleotides such that (N)x and (N′)y form less than 15 base pairs in the double stranded compound.

[0242] In other embodiments the present invention provides a compound having Structure (O) set forth below:

| | |
|---|---|
| (O) | 5′ (N)ₓ-Z 3′ (antisense strand) |
| | 3′ Z′-(N′)_{y} 5′ (sense strand) |

wherein each of N is a nucleotide selected from an unmodified ribonucleotide, a modified ribonucleotide, an unmodified deoxyribonucleotide and a modified deoxyribonucleotide;
wherein each of N′ is a nucleotide analog selected from a six membered sugar nucleotide, seven membered sugar nucleotide, morpholino moiety, peptide nucleic acid and combinations thereof;
wherein each of (N)ₓ and (N′)_{y} is an oligonucleotide in which each consecutive N or N′ is joined to the next N or N′ by a covalent bond;
wherein Z and Z′ are absent;
wherein each of x and y is an integer between 18 and 40;
wherein the sequence of (N)x is substantially complementary to the sequence of (N′)y; and the sequence of (N′)y is substantially identical to the mRNA of a target gene.

[0243] In other embodiments the present invention provides a compound having Structure (P) set forth below:

| | |
|---|---|
| (P) | 5′ (N)ₓ-Z 3′ (antisense strand) |
| | 3′ Z′-(N′)_{y} 5′ (sense strand) |

wherein each of N and N′ is a nucleotide selected from an unmodified ribonucleotide, a modified ribonucleotide, an unmodified deoxyribonucleotide and a modified deoxyribonucleotide;
wherein each of (N)ₓ and (N′)_{y} is an oligonucleotide in which each consecutive N or N′ is joined to the next N or N′ by a covalent bond;
wherein Z and Z′ are absent;
wherein each of x and y is an integer between 18 and 40;
wherein one of N or N′ in an internal position of (N)x or (N′)y or one or more of N or N′ at a terminal position of (N)x or (N′)y comprises an abasic moiety or a 2′ modified nucleotide;
wherein the sequence of (N)x is substantially complementary to the sequence of (N′)y; and the sequence of (N′)y is substantially identical to the mRNA of a target gene.

[0244] In various embodiments (N′)y comprises a modified nucleotide at position 15 wherein the modified nucleotide is selected from a mirror nucleotide and a deoxyribonucleotide.

[0245] In certain embodiments (N′)y further comprises a modified nucleotide at position 2 wherein the modified nucleotide is selected from a mirror nucleotide and an abasic pseudo-nucleotide analog.

[0246] In various embodiments the antisense strand (N)x comprises 2′O-Me modified ribonucleotides at the odd numbered positions (5′ to 3′; positions 1, 3, 5, 7, 9, 11, 13, 15, 17, 19). In some embodiments (N)ₓ further comprises 2′O-Me modified ribonucleotides at one or both positions 2 and 18. In other embodiments (N)x comprises 2′O Me modified ribonucleotides at positions 2, 4, 6, 8, 11, 13, 15, 17, 19.

[0247] The Structural motifs described above are useful with any oligonucleotide pair (sense and antisense strands) to a mammalian or non-mammalian gene. In some embodiments the mammalian gene is a human gene preferably selected from the genes for which the mRNA is provided in Tables A1-A2 (SEQ ID NOS:1-89).

[0248] In another aspect the present invention provides a pharmaceutical composition comprising a modified or unmodified compound of the present invention, in an amount effective to inhibit human gene expression wherein the compound comprises an antisense sequence, (N)ₓ; and a pharmaceutically acceptable carrier.

[0249] In yet another aspect the present invention provides a pharmaceutical composition comprising one or more modified compounds of the present invention, in an amount effective to inhibit human gene expression wherein the compound comprises an antisense sequence, (N)ₓ; and a pharmaceutically acceptable carrier.

### Pharmaceutical Compositions

[0250] While it may be possible for the compounds of the present invention to be administered as the raw chemical, it is preferable to present them as a pharmaceutical composition. Accordingly the present invention provides a pharmaceutical composition comprising one or more of the compounds of the invention; and a pharmaceutically acceptable carrier. This composition may comprise a mixture of two or more different oligonucleotides/siRNAs.

[0251] The invention further provides a pharmaceutical composition comprising at least one compound of the invention covalently or non-covalently bound to one or more compounds of the invention in an amount effective to inhibit one or more genes as disclosed above; and a pharmaceutically acceptable carrier. The compound may be processed intracellularly by endogenous cellular complexes to produce one or more oligoribonucleotides of the invention.

[0252] The invention further provides a pharmaceutical composition comprising a pharmaceutically acceptable carrier and one or more of the compounds of the invention in an amount effective to down-regulate expression in a cell of a human gene, the compound comprising a sequence substantially complementary to the sequence of (N)ₓ.

[0253] The present invention also provides for a process of preparing a pharmaceutical composition, which comprises:

providing one or more compounds of the invention; and
admixing said compound with a pharmaceutically acceptable carrier.

[0254] The present invention also provides for a process of preparing a pharmaceutical composition, which comprises admixing one or more compounds of the present invention with a pharmaceutically acceptable carrier.

[0255] In a preferred embodiment, the compound used in the preparation of a pharmaceutical composition is admixed with a carrier in a pharmaceutically effective dose. In a particular embodiment the compound of the present invention is conjugated to a steroid or to a lipid or to another suitable molecule e.g. to cholesterol.

[0256] Additionally, the invention provides a method of inhibiting the expression of a gene of the present invention by at least 50% as compared to a control comprising contacting an mRNA transcript of the gene of the present invention with one or more of the compounds of the invention. In some embodiments an active siRNA compound inhibits gene expression at a level of at least 50%, 60% or 70% as compared to control. In certain preferred embodiments inhibition is at a level of at least 75%, 80% or 90% as compared to control.

[0257] In one embodiment the oligoribonucleotide is inhibiting one or more of the genes of the present invention, whereby the inhibition is selected from the group comprising inhibition of gene function, inhibition of polypeptide and inhibition of mRNA expression.

[0258] In one embodiment the compound inhibits a polypeptide, whereby the inhibition is selected from the group comprising inhibition of function (which may be examined by an enzymatic assay or a binding assay with a known interactor of the native gene/polypeptide, inter alia), inhibition of protein (which may be examined by Western blotting, ELISA or immuno-precipitation, inter alia) and inhibition of mRNA expression (which may be examined by Northern blotting, quantitative RT-PCR, in-situ hybridisation or microarray hybridisation, inter alia).

### Delivery

[0259] The siRNA molecules of the present invention may be delivered to the target tissue by direct application of the naked molecules prepared with a carrier or a diluent.

[0260] The term “naked siRNA” refers to siRNA molecules that are free from any delivery vehicle or formulation that acts to assist, promote or facilitate entry into the cell, including viral sequences, viral particles, liposome formulations, lipofectin or precipitating agents and the like. For example, siRNA in PBS is “naked siRNA”. In preferred embodiments of the invention the siRNA is delivered as naked siRNA.

[0261] siRNA molecules may be delivered in liposome or lipofectin formulations and the like and can be prepared by methods well known to those skilled in the art. Such methods are described, for example, in U.S. Pat. Nos. 5,593,972, 5,589,466, and 5,580,859, which are herein incorporated by reference.

[0262] Delivery systems aimed specifically at the enhanced and improved delivery of siRNA into mammalian cells have been developed, (see, for example, Shen et al FEBS Let. 2003, 539:111-114; Xia et al., Nat. Biotech. 2002, 20:1006-1010; Reich et al., Mol. Vision 2003, 9: 210-216; Sorensen et al., J. Mol. Biol. 2003. 327: 761-766; Lewis et al., Nat. Gen. 2002, 32: 107-108 and Simeoni et al., NAR 2003, 31, 11: 2717-2724).

[0263] The pharmaceutically acceptable carriers, solvents, diluents, excipients, adjuvants and vehicles as well as implant carriers generally refer to inert, non-toxic solid or liquid fillers, diluents or encapsulating material not reacting with the active ingredients of the invention and they include liposomes and microspheres. Examples of delivery systems useful in the present invention include U.S. Pat. Nos. 5,225,182; 5,169,383; 5,167,616; 4,959,217; 4,925,678; 4,487,603; 4,486,194; 4,447,233; 4,447,224; 4,439,196; and 4,475,196. Many other such implants, delivery systems, and modules are well known to those skilled in the art.

[0264] Any suitable route of administration may be employed for providing the subject with an effective dosage. For example, oral, rectal, parenteral (subcutaneous, intramuscular, intravenous), transdermal, and like forms of administration may be employed. Dosage forms may include tablets, troches, dispersions, suspensions, solutions, capsules, patches, and the like. In preferred embodiments of the present invention the siRNA reaches its target cell systemically, via the circulatory system. The siRNAs or pharmaceutical compositions of the present invention are administered and dosed in accordance with good medical practice, taking into account the clinical condition of the individual patient, the disease to be treated, the site and method of administration, scheduling of administration, patient age, sex, body weight and other factors known to medical practitioners.

[0265] The “therapeutically effective dose” for purposes herein is thus determined by such considerations as are known in the art. The dose must be effective to achieve improvement including but not limited to improved survival rate or more rapid recovery, or improvement or elimination of symptoms and other indicators as are selected as appropriate measures by those skilled in the art.

[0266] In general, the active dose of compound for humans is in the range of from 1 ng/kg to about 20-100 mg/kg body weight per day, preferably about 0.01 mg to about 2-10 mg/kg body weight per day, in a regimen of one dose per day or twice or three or more times per day for a period of 1-4 weeks or longer.

[0267] The compounds of the present invention can be administered by any of the conventional routes of administration. It should be noted that the compound can be administered as the compound or as pharmaceutically acceptable salt and can be administered alone or as an active ingredient in combination with pharmaceutically acceptable carriers, solvents, diluents, excipients, adjuvants and vehicles.

[0268] According to the present invention the preferred method of delivery is systemic delivery.

[0269] The compounds can be administered orally, subcutaneously or parenterally including intravenous, intraarterial, intramuscular, intraperitoneally, and intranasal, inhalation, transtymopanic administration as well as intrathecal and infusion techniques. Implants of the compounds are also useful. Liquid forms may be prepared for injection, the term including subcutaneous, transdermal, intravenous, intramuscular, intrathecal, and other parental routes of administration. The liquid compositions include aqueous solutions, with and without organic co-solvents, aqueous or oil suspensions, emulsions with edible oils, as well as similar pharmaceutical vehicles. In a particular embodiment, the administration comprises intravenous administration. In another embodiment the administration comprises topical or local administration.

[0270] The phrases “systemic delivery”, “systemic administration”, “administered systematically” refer to the administration of a compound, or composition such that it enters the patient's circulatory system.

[0271] These compounds may be administered to humans and other animals for therapy by any suitable route of administration, including orally, nasally, as by, for example, a spray, rectally, intravaginally, parenterally, intracisternally and topically, as by powders, ointments or drops, including buccally and sublingually.

[0272] In addition, in certain embodiments the compositions for use in the novel treatments of the present invention may be formed as aerosols, for example for intranasal administration.

[0273] In certain embodiments, oral compositions (such as tablets, suspensions, solutions) may be effective for local delivery to the oral cavity such as oral composition suitable for mouthwash for the treatment of oral mucositis.

[0274] In preferred embodiments the subject being treated is a warm-blooded animal and, in particular, mammals including human.

### Methods of Treatment

[0275] In one aspect, the present invention relates to a method for the treatment of a subject in need of treatment for a disease or disorder associated with expression of a gene listed in Tables A1 and A2 in an immature myeloid cell of the subject, comprising administering to the subject an amount of an inhibitor which inhibits expression of at least one of the genes. In some embodiments more than one siRNA compound to one or more than one gene target is administered.

[0276] In preferred embodiments the subject being treated is a warm-blooded animal and, in particular, mammals including human.

[0277] The methods of the invention comprise administering to the subject one or more inhibitory compounds which down-regulate expression of the genes of Tables A1-A2; and in particular siRNA in a therapeutically effective dose so as to thereby treat the subject. In certain preferred embodiments an siRNA compound comprises an antisense and sense sequence pair set forth in Tables B or G. Certain preferred siRNA compounds are listed in Table G and set forth in SEQ ID NOS:24,076-24,117)

[0278] The term “treatment” refers to both therapeutic treatment and prophylactic or preventative measures, wherein the object is to prevent or slow down, attenuate the related disorder as listed above. Those in need of treatment include those already experiencing the disease or condition, those prone to having the disease or condition, and those in which the disease or condition is to be prevented. The compounds of the invention may be administered before, during or subsequent to the onset of the disease or condition or symptoms associated therewith. In cases where treatment is for the purpose of prevention, then the present invention relates to a method for delaying the onset of or averting the development of the disease or disorder.

[0279] In one aspect the present invention also provides a method of treating cancer in a subject in need thereof which comprises administering systemically to the subject a therapeutically effective amount of an oligonucleotide which inhibits expression of a gene expressed in a myeloid cell in the subject in an amount effective to treat the cancer.

[0280] In another aspect the present invention provides a method of treating a subject suffering from a disorder in which the level of T cell receptor zeta chain (CD3ζ; CD3 zeta) is reduced or absent comprising administering to the subject an oligonucleotide which inhibits expression of a NOX gene expressed in a myeloid cell in the subject in an amount effective to treat the disorder.

[0281] In a further aspect the present invention provides a method of reducing tumor vascularization and tumor progression in a subject in need thereof which comprises administering systemically to the subject a therapeutically effective amount of an oligonucleotide which inhibits expression of a gene expressed in a myeloid cell in the subject in an amount effective to reduce tumor vascularization and tumor progression.

[0282] By “cancer” is meant any disease that is caused by or results in inappropriately high levels of cell division, inappropriately low levels of apoptosis, or both. Examples of cancer include, without limitation, leukemias (e.g., acute leukemia, acute lymphocytic leukemia, acute myelocytic leukemia, acute myeloblastic leukemia, acute promyelocytic leukemia, acute myelomonocytic leukemia, acute monocytic leukemia, acute erythroleukemia, chronic leukemia, chronic rnyelocytic leukemia, chronic lymphocytic leukemia), polycythemia vera, lymphoma (Hodgkin's disease, non-Hodgkin's disease), Waldenstrom's macroglobulinemia, heavy chain disease, and solid tumors such as sarcomas and carcinomas (e.g., fibrosarcoma, myxosarcoma, liposarcoma, chondrosarcoma, osteogenic sarcoma, chordoma, angiosarcoma, endotheliosarcoma, lymphangio sarcoma, lymphangioendotheliosarcoma, synovioma, mesothelioma, Ewing's tumor, leiomyo sarcoma, rhabdomyosarcoma, colon carcinoma, pancreatic cancer, breast cancer, ovarian cancer, prostate cancer, squamous cell carcinoma, basal cell carcinoma, adenocarcinoma, sweat gland carcinoma, sebaceous gland carcinoma, papillary carcinoma, papillary adenocarcinomas, cystadenocarcinoma, medullary carcinoma, bronchogenic carcinoma, renal cell carcinoma, hepatoma, nile duct carcinoma, choriocarcinoma, seminoma, embryonal carcinoma, Wilm's tumor, cervical cancer, uterine cancer, testicular cancer, lung carcinoma, small cell lung carcinoma, bladder carcinoma, epithelial carcinoma, glioma, astrocytoma, medulloblastoma, crailiopharyngioma, ependymoma, pinealoma, hemangioblastoma, acoustic neuroma, oligodenroglioma, schwamioma, meningioma, melanoma, neuroblastoma, and retinoblastoma).

### Combination Therapy

[0283] One aspect of the present invention relates to combination therapy. In one embodiment, the co-administration of two or more therapeutic agents achieves a synergistic effect, i.e., a therapeutic affect that is greater than the sum of the therapeutic effects of the individual components of the combination. In another embodiment, the co-administration of two or more therapeutic agents achieves an additive effect.

[0284] The active ingredients that comprise a combination therapy may be administered together via a single dosage form or by separate administration of each active agent. In certain embodiments, the first and second therapeutic agents are administered in a single dosage form. The agents may be formulated into a single tablet, pill, capsule, or solution for parenteral administration and the like. Alternatively, the first therapeutic agent and the second therapeutic agents may be administered as separate compositions. The first active agent may be administered at the same time as the second active agent or the first active agent may be administered intermittently with the second active agent. The length of time between administration of the first and second therapeutic agent may be adjusted to achieve the desired therapeutic effect. For example, the second therapeutic agent may be administered only a few minutes (e.g., 1, 2, 5, 10, 30, or 60 min) or several hours (e.g., 2, 4, 6, 10, 12, 24, or 36 hr) after administration of the first therapeutic agent. In certain embodiments, it may be advantageous to administer more than one dosage of one of the therapeutic agents between administrations of the second therapeutic agent. For example, the second therapeutic agent may be administered at 2 hours and then again at 10 hours following administration of the first therapeutic agent. Alternatively, it may be advantageous to administer more than one dosage of the first therapeutic agent between administrations of the second therapeutic agent. Importantly, it is preferred that the therapeutic effects of each active ingredient overlap for at least a portion of the duration of each therapeutic agent so that the overall therapeutic effect of the combination therapy is attributable in part to the combined or synergistic effects of the combination therapy.

[0285] The present invention relates to the use of compounds which down-regulate the expression of the genes of the invention particularly to novel small interfering RNAs (siRNAs), in the treatment of the following diseases or conditions in which inhibition of the expression of the Methods, molecules and compositions which inhibit the genes of the invention are discussed herein at length, and any of said molecules and/or compositions may be beneficially employed in the treatment of a subject suffering from any of said conditions.

[0286] The compounds of the present invention can be administered alone or in combination with a chemotherapeutic agent. A “chemotherapeutic agent” is a chemical compound useful in the treatment of cancer. Examples of chemotherapeutic agents include alkylating agents such as thiotepa and CYTOXAN® cyclosphosphamide; alkyl sulfonates such as busulfan, improsulfan and piposulfan; aziridines such as benzodopa, carboquone, meturedopa, and uredopa; ethylenimines and methylamelamines including altretamine, triethylenemelamine, trietylenephosphoramide, triethiylenethiophosphoramide and trimethylolomelamine; acetogenins (especially bullatacin and bullatacinone); delta-9-tetrahydrocannabinol (dronabinol, MARINOL®); beta-lapachone; lapachol; colchicines; betulinic acid; a camptothecin (including the synthetic analogue topotecan (HYCAMTIN®), CPT-11 (irinotecan, CAMPTOSAR®), acetylcamptothecin, scopolectin, and 9-aminocamptothecin); bryostatin; callystatin; CC-1065 (including its adozelesin, carzelesin and bizelesin synthetic analogues); podophyllotoxin; podophyllinic acid; teniposide; cryptophycins (particularly cryptophycin 1 and cryptophycin 8); dolastatin; duocarmycin (including the synthetic analogues, KW-2189 and CB1-TM1); eleutherobin; pancratistatin; a sarcodictyin; spongistatin; nitrogen mustards such as chlorambucil, chlornaphazine, cholophosphamide, estramustine, ifosfamide, mechlorethamine, mechlorethamine oxide hydrochloride, melphalan, novembichin, phenesterine, prednimustine, trofosfamide, uracil mustard; nitrosureas such as carmustine, chlorozotocin, fotemustine, lomustine, nimustine, and ranimnustine; antibiotics such as the enediyne antibiotics (e.g., calicheamicin, especially calicheamicin gamma 1I and calicheamicin omegaI1 (see, e.g., Agnew, Chem. Intl. Ed. Engl., 1994. 33: 183-186); dynemicin, including dynemicin A; an esperamicin; as well as neocarzinostatin chromophore and related chromoprotein enediyne antibiotic chromophores), aclacinomysins, actinomycin, authramycin, azaserine, bleomycins, cactinomycin, carabicin, caminomycin, carzinophilin, chromomycinis, dactinomycin, daunorubicin, detorubicin, 6-diazo-5-oxo-L-norleucine, doxorubicin (including ADRIAMYCIN®, morpholino-doxorubicin, cyanomorpholino-doxorubicin, 2-pyrrolino-doxorubicin, doxorubicin HCl liposome injection (DOXIL®) and deoxydoxorubicin), epirubicin, esorubicin, idarubicin, marcellomycin, mitomycins such as mitomycin C, mycophenolic acid, nogalamycin, olivomycins, peplomycin, potfiromycin, puromycin, quelamycin, rodorubicin, streptonigrin, streptozocin, tubercidin, ubenimex, zinostatin, zorubicin; anti-metabolites such as methotrexate, gemcitabine (GEMZAR®), tegafur (UFTORAL®), capecitabine (XELODA®), an epothilone, and 5-fluorouracil (5-FU); folic acid analogues such as denopterin, methotrexate, pteropterin, trimetrexate; purine analogs such as fludarabine, 6-mercaptopurine, thiamiprine, thioguanine; pyrimidine analogs such as ancitabine, azacitidine, 6-azauridine, cannofiir, cytarabine, dideoxyuridine, doxifluridine, enocitabine, floxuridine; androgens such as calusterone, dromostanolone propionate, epitiostanol, mepitiostane, testolactone; anti-adrenals such as aminoglutethimide, mitotane, trilostane; folic acid replenisher such as frolinic acid; aceglatone; aldophosphamide glycoside; aminolevulinic acid; eniluracil; amsacrine; bestrabucil; bisantrene; edatraxate; defofamine; demecolcine; diaziquone; elformithine; elliptinium acetate; etoglucid; gallium nitrate; hydroxyurea; lentinan; lonidainine; maytansinoids such as maytansine and ansamitocins; mitoguazone; mitoxantrone; mopidanmol; nitraerine; pentostatin; phenamet; pirarubicin; losoxantrone; 2-ethylhydrazide; procarbazine; PSK® polysaccharide complex; razoxane; rhizoxin; sizofuran; spirogermanium; tenuazonic acid; triaziquone; 2,2′,2″-trichlorotriethylamine; trichothecenes (especially T-2 toxin, verracurin A, roridin A and anguidine); urethan; vindesine (ELDISINE®, FILDESIN®); dacarbazine; mannomustine; mitobronitol; mitolactol; pipobroman; gacytosine; arabinoside (“Ara-C”); thiotepa; taxoids, e.g., paclitaxel (TAXOL®), albumin-engineered nanoparticle formulation of paclitaxel (ABRAXANE™), and doxetaxel (TAXOTERE®); chloranbucil; 6-thioguanine; mercaptopurine; methotrexate; a platinum analog such as cisplatin and carboplatin; vinblastine (VELBAN®); platinum; etoposide (VP-16); ifosfamide; mitoxantrone; vincristine (ONCOVIN®); oxaliplatin; leucovovin; vinorelbine (NAVELBINE®); novantrone; edatrexate; daunomycin; aminopterin; ibandronate; topoisomerase inhibitor RFS 2000; difluoromethylornithine (DMFO); a retinoid such as retinoic acid; pharmaceutically acceptable salts, acids or derivatives of any of the above; as well as combinations of two or more of the above such as CHOP, an abbreviation for a combined therapy of cyclophosphamide, doxorubicin, vincristine, and prednisolone, and FOLFOX, an abbreviation for a treatment regimen with oxaliplatin (ELOXATIN®) combined with 5-FU and leucovovin.

[0287] Also included in this definition are anti-hormonal agents that act to regulate, reduce, block, or inhibit the effects of hormones that can promote the growth of cancer, and are often in the form of systemic, or whole-body treatment. They may be hormones themselves. Examples include anti-estrogens and selective estrogen receptor modulators (SERMs), including, for example, tamoxifen (including NOLVADEX® tamoxifen), raloxifene (EVISTA®), droloxifene, 4-hydroxytamoxifen, trioxifene, keoxifene, LY117018, onapristone, and toremifene (FARESTON®); anti-progesterones; estrogen receptor down-regulators (ERDs); agents that function to suppress or shut down the ovaries, for example, leutinizing hormone-releasing hormone (LHRH) agonists such as leuprolide acetate (LUPRON® and ELIGARD®), goserelin acetate, buserelin acetate and tripterelin; other anti-androgens such as flutamide, nilutamide and bicalutamide; and aromatase inhibitors such as, for example, 4(5)-imidazoles, aminoglutethimide, megestrol acetate (MEGASE®), exemestane (AROMASIN®), formestanie, fadrozole, vorozole (RIVISOR®), letrozole (FEMARA®), and anastrozole (ARIMIDEX®). In addition, bisphosphonates such as clodronate (for example, BONEFOS® or OSTAC®), etidronate (DIDROCAL®), NE-58095, zoledronic acid/zoledronate (ZOMETA®), alendronate (FOSAMAX®), pamidronate (AREDIA®), tiludronate (SKELID®), or risedronate (ACTONEL®); as well as troxacitabine (a 1,3-dioxolane nucleoside cytosine analog); siRNA, ribozyme and antisense oligonucleotides, particularly those that inhibit expression of genes in signaling pathways implicated in aberrant cell proliferation; vaccines such as THERATOPE® vaccine and gene therapy vaccines, for example, ALLOVECTIN® vaccine, LEUVECTIN® vaccine, and VAXID® vaccine; topoisomerase 1 inhibitor (e.g., LURTOTECAN®); rmRH (e.g., ABARELIX®); lapatinib ditosylate (an ErbB-2 and EGFR dual tyrosine kinase small-molecule inhibitor also known as GW572016); COX-2 inhibitors such as celecoxib (CELEBREX®; 4-(5-(4-methylphenyl)-3-(trifluoromethyl)-1H-pyrazol-1-yl) benzenesulfonamide; and pharmaceutically acceptable salts, acids or derivatives of any of the above.

siRNA Synthesis

[0288] The compounds of the present invention can be synthesized by any of the methods that are well-known in the art for synthesis of ribonucleic (or deoxyribonucleic) oligonucleotides. Such synthesis is, among others, described in Beaucage and Iyer, Tetrahedron 1992; 48:2223-2311; Beaucage and Iyer, Tetrahedron 1993; 49: 6123-6194 and Caruthers, et. al., Methods Enzymol. 1987; 154: 287-313; the synthesis of thioates is, among others, described in Eckstein, Annu. Rev. Biochem. 1985; 54: 367-402, the synthesis of RNA molecules is described in Sproat, in Humana Press 2005 edited by Herdewijn P.; Kap. 2: 17-31 and respective downstream processes are, among others, described in Pingoud et. al., in IRL Press 1989 edited by Oliver; Kap. 7: 183-208.

[0289] Other synthetic procedures are known in the art e.g. the procedures as described in Usman et al., J. Am. Chem. Soc., 1987, 109:7845; Scaringe et al., NAR, 1990, 18:5433; Wincott et al., NAR 1995, 23:2677-2684; and Wincott et al., Methods Mol. Bio., 1997, 74:59, and these procedures may make use of common nucleic acid protecting and coupling groups, such as dimethoxytrityl at the 5′-end, and phosphoramidites at the 3′-end. The modified (e.g. 2′-O-methylated) nucleotides and unmodified nucleotides are incorporated as desired.

[0290] The oligonucleotides of the present invention can be synthesized separately and joined together post-synthetically, for example, by ligation (Moore et al., Science 1992, 256:9923; International Patent Publication No. WO 93/23569; Shabarova et al., NAR 1991, 19:4247; Bellon et al., Nucleosides & Nucleotides, 1997, 16:951; Bellon et al., Bioconjugate Chem 1997, 8:204), or by hybridization following synthesis and/or deprotection.

[0291] It is noted that a commercially available machine (available, inter alia, from Applied Biosystems) can be used; the oligonucleotides are prepared according to the sequences disclosed herein. Overlapping pairs of chemically synthesized fragments can be ligated using methods well known in the art (e.g., see U.S. Pat. No. 6,121,426). The strands are synthesized separately and then are annealed to each other in the tube. Then, the double-stranded siRNAs are separated from the single-stranded oligonucleotides that were not annealed (e.g. because of the excess of one of them) by HPLC. In relation to the siRNAs or siRNA fragments of the present invention, two or more such sequences can be synthesized and linked together for use in the present invention.

[0292] The compounds of the invention can also be synthesized via tandem synthesis methodology, as described for example in US Patent Publication No. 2004/0019001 (McSwiggen), and in PCT Patent Publication No. WO 2007/091269 (assigned to the assignee of the present invention and incorporated herein in its entirety by reference) wherein both siRNA strands are synthesized as a single contiguous oligonucleotide fragment or strand separated by a cleavable linker which is subsequently cleaved to provide separate siRNA fragments or strands that hybridize and permit purification of the siRNA duplex. The linker can be a polynucleotide linker or a non-nucleotide linker.

[0293] The present invention further provides for a pharmaceutical composition comprising two or more siRNA molecules for the treatment of any of the diseases and conditions mentioned herein, whereby said two molecules may be physically mixed together in the pharmaceutical composition in amounts which generate equal or otherwise beneficial activity, or may be covalently or non-covalently bound, or joined together by a nucleic acid linker of a length ranging from 2-100, preferably 2-50 or 2-10 nucleotides.

[0294] Thus, the siRNA molecules may be covalently or non-covalently bound or joined by a linker to form a tandem siRNA compound. Such tandem siRNA compounds comprising two siRNA sequences are typically about 38-150 nucleotides in length, more preferably 38 or 40-60 nucleotides in length, and longer accordingly if more than two siRNA sequences are included in the tandem molecule. A longer tandem compound comprised of two or more longer sequences which encode siRNA produced via internal cellular processing, e.g., long dsRNAs, is also envisaged, as is a tandem molecule encoding two or more shRNAs. Such tandem molecules are also considered to be a part of the present invention. A tandem compound comprising two or more siRNAs sequences of the invention is envisaged.

[0295] Additionally, the siRNA disclosed herein or any nucleic acid molecule comprising or encoding such siRNA can be linked or bound (covalently or non-covalently) to antibodies (including aptamer molecules) against cell surface internalizable molecules expressed on the target cells, in order to achieve enhanced targeting for treatment of the diseases disclosed herein. For example, anti-Fas antibody (preferably a neutralizing antibody) may be combined (covalently or non-covalently) with any of the siRNA compounds.

[0296] The compounds of the present invention are delivered either directly or with viral or non-viral vectors. When delivered directly the sequences are generally rendered nuclease resistant. Alternatively the sequences are incorporated into expression cassettes or constructs such that the sequence is expressed in the cell as discussed herein below. Generally the construct contains the proper regulatory sequence or promoter to allow the sequence to be expressed in the targeted cell. Vectors optionally used for delivery of the compounds of the present invention are commercially available, and may be modified for the purpose of delivery of the compounds of the present invention by methods known to one of skill in the art.

[0297] It is also envisaged that a long oligonucleotide (typically 25-500 nucleotides in length) comprising one or more stem and loop structures, where stem regions comprise the sequences of the oligonucleotides of the invention, may be delivered in a carrier, preferably a pharmaceutically acceptable carrier, and may be processed intracellularly by endogenous cellular complexes (e.g. by DROSHA and DICER as described above) to produce one or more smaller double stranded oligonucleotides (siRNAs) which are oligonucleotides of the invention. This oligonucleotide can be termed a tandem shRNA construct. It is envisaged that this long oligonucleotide is a single stranded oligonucleotide comprising one or more stem and loop structures, wherein each stem region comprises a sense and corresponding antisense siRNA sequence of the genes of the invention.

### RNA Interference

[0298] A number of PCT applications have recently been published that relate to the RNAi phenomenon. These include: PCT publication WO 00/44895; PCT publication WO 00/49035; PCT publication WO 00/63364; PCT publication WO 01/36641; PCT publication WO 01/36646; PCT publication WO 99/32619; PCT publication WO 00/44914; PCT publication WO 01/29058; and PCT publication WO 01/75164.

[0299] RNA interference (RNAi) is based on the ability of dsRNA species to enter a cytoplasmic protein complex, where it is then targeted to the complementary cellular RNA and specifically degrade it. The RNA interference response features an endonuclease complex containing an siRNA, commonly referred to as an RNA-induced silencing complex (RISC), which mediates cleavage of single-stranded RNA having a sequence complementary to the antisense strand of the siRNA duplex. Cleavage of the target RNA may take place in the middle of the region complementary to the antisense strand of the siRNA duplex (Elbashir et al., Genes Dev., 2001, 15(2):188-200). In more detail, longer dsRNAs are digested into short (17-29 bp) dsRNA fragments (also referred to as short inhibitory RNAs, “siRNAs”) by type III RNAses (DICER, DROSHA, etc.; Bernstein et al., Nature, 2001, 409(6818):363-6; Lee et al., Nature, 2003, 425(6956):415-9). The RISC protein complex recognizes these fragments and complementary mRNA. The whole process is culminated by endonuclease cleavage of target mRNA (McManus & Sharp, Nature Rev Genet, 2002, 3(10):737-47; Paddison & Hannon, Curr Opin Mol. Ther. 2003, 5(3):217-24). (For additional information on these terms and proposed mechanisms, see for example Bernstein et al., RNA 2001, 7(11):1509-21; Nishikura, Cell 2001, 107(4):415-8 and PCT publication WO 01/36646).

[0300] Several groups have described the development of DNA-based vectors capable of generating siRNA within cells. The method generally involves transcription of short hairpin RNAs that are efficiently processed to form siRNAs within cells (Paddison et al. PNAS USA 2002, 99:1443-1448; Paddison et al. Genes & Dev 2002, 16:948-958; Sui et al. PNAS USA 2002, 8:5515-5520; and Brummelkamp et al. Science 2002, 296:550-553). These reports describe methods to generate siRNAs capable of specifically targeting numerous endogenously and exogenously expressed genes.

[0301] The invention has been described in an illustrative manner, and it is to be understood that the terminology used is intended to be in the nature of words of description rather than of limitation.

[0302] Obviously, many modifications and variations of the present invention are possible in light of the above teachings. It is, therefore, to be understood that within the scope of the appended claims, the invention can be practiced otherwise than as specifically described.

[0303] Throughout this application, various publications, including United States patents, are referenced by author and year and patents by number. The disclosures of these publications and patents and patent applications in their entireties are hereby incorporated by reference into this application in order to more fully describe the state of the art to which this invention pertains.

[0304] The present invention is illustrated in detail below with reference to examples, but is not to be construed as being limited thereto.

[0305] Citation of any document herein is not intended as an admission that such document is pertinent prior art, or considered material to the patentability of any claim of the present application. Any statement as to content or a date of any document is based on the information available to applicant at the time of filing and does not constitute an admission as to the correctness of such a statement.

### EXAMPLES

[0306] Without further elaboration, it is believed that one skilled in the art can, using the preceding description, utilize the present invention to its fullest extent. The following preferred specific embodiments are, therefore, to be construed as merely illustrative, and not limitative of the claimed invention in any way.

[0307] Standard molecular biology protocols known in the art not specifically described herein are generally followed essentially as in Sambrook et al., Molecular cloning: A laboratory manual, Cold Springs Harbor Laboratory, New-York (1989, 1992), and in Ausubel et al., Current Protocols in Molecular Biology, John Wiley and Sons, Baltimore, Md. (1988), and as in Ausubel et al., Current Protocols in Molecular Biology, John Wiley and Sons, Baltimore, Md. (1989) and as in Perbal, A Practical Guide to Molecular Cloning, John Wiley & Sons, New York (1988), and as in Watson et al., Recombinant DNA, Scientific American Books, New York and in Birren et al (eds) Genome Analysis: A Laboratory Manual Series, Vols. 1-4 Cold Spring Harbor Laboratory Press, New York (1998) and methodology as set forth in U.S. Pat. Nos. 4,666,828; 4,683,202; 4,801,531; 5,192,659 and 5,272,057 and incorporated herein by reference. Polymerase chain reaction (PCR) was carried out as in standard PCR Protocols: A Guide To Methods And Applications, Academic Press, San Diego, Calif. (1990). In situ PCR in combination with Flow Cytometry (FACS) can be used for detection of cells containing specific DNA and mRNA sequences (Testoni et al., Blood 1996, 87:3822.) Methods of performing RT-PCR are well known in the art.

### Cell Culture

[0308] HeLa cells (American Type Culture Collection) were cultured as described in Czauderna, et al. (NAR, 2003. 31:670-82). Human keratinocytes were cultured at 37° C. in Dulbecco's modified Eagle medium (DMEM) containing 10% FCS. The mouse cell line, B16V (American Type Culture Collection), was cultured at 37° C. in Dulbecco's modified Eagle medium (DMEM) containing 10% FCS. Culture conditions were as described in (Methods Find Exp Clin Pharmacol. 1997, 19(4):231-9).

[0309] In each case, the cells were subject to the experiments as described herein at a density of about 50,000 cells per well and the double-stranded nucleic acid according to the present invention was added at 20 nM, whereby the double-stranded nucleic acid was complexed using 1 μg/ml of a proprietary lipid as described below.

### Induction of Hypoxia-Like Conditions

[0310] The cells were treated with CoCl₂ for inducing a hypoxia-like condition as follows: siRNA transfections were carried out in 10-cm plates (30-50% confluency) as described by Czauderna et al., (2003, NAR 31(11)2705-16) and Kretschmer et al., (2003 Oncogene. 22(43):6748-63). Briefly, siRNA were transfected by adding a preformed 10× concentrated complex of GB and lipid in serum-free medium to cells in complete medium. The total transfection volume was 10 ml. The final lipid concentration was 1.0 μg/ml; the final siRNA concentration was 20 nM unless otherwise stated. Induction of the hypoxic responses was carried out by adding CoCl₂ (100 μM) directly to the tissue culture medium 24 h before lysis.

[0311] Preparation of Cell Extracts and Immuno Blotting: the Preparation of Cell Extracts and immunoblot analysis were carried out essentially as described (Klippel et al. Mol Cell Biol, 1998. 18:5699-711; Klippel, A., et al., Mol Cell Biol, 1996. 16:4117-27).

### Example 1

### In Vitro Testing of siRNA Compounds

[0312] About 1.5−2×10⁵ tested cells (HeLa cells and/or 293T cells for siRNA targeting human genes and NRK52 cells and/or NMUMG cells for siRNA targeting the rat/mouse gene) were seeded per well in 6 wells plate (70-80% confluent).

[0313] 24 hour later, cells were transfected with siRNA compounds using the Lipofectamine™ 2000 reagent (Invitrogen) at final concentrations of 5 nM or 20 nM. The cells were incubated at 37° C. in a CO₂ incubator for 72 h.

[0314] As positive control for transfection PTEN-Cy3 labeled siRNA compounds were used. An additional positive control used was a blunt-ended 19-mer siRNA, i.e. x=y=19 wherein Z and Z′ are both absent. This siRNA was non-phosphorylated and had alternating ribonucleotides modified at the 2′ position of the sugar residue in both the antisense and the sense strands, wherein the moiety at the 2′ position is methoxy (2′-O-methyl) and wherein the ribonucleotides at the 5′ and 3′ termini of the antisense strand are modified in their sugar residues, and the ribonucleotides at the 5′ and 3′ termini of the sense strand are unmodified in their sugar residues. GFP siRNA compounds were used as negative control for siRNA activity.

[0315] At 72 h after transfection, cells were harvested and RNA was extracted from cells. Transfection efficiency was tested by fluorescent microscopy.

[0316] The percent of inhibition of gene expression using specific preferred siRNA structures was determined using qPCR analysis of a target gene in cells expressing the endogenous gene.

[0317] In general, the siRNAs having specific sequences that were selected for in vitro testing were specific for human and a second species such as rat or rabbit genes. Similar results are obtained using siRNAs having these RNA sequences and modified as described herein.

### Example 2

### Distribution and Activity of siRNA in Bone Marrow

[0318] Time-Dependent Distribution of siRNA in Organs and Tissues

[0319] Distribution of proprietary siRNA was measured in rat tissues and organs following four consequent bolus intravenous injections of 10 mg/kg siRNA (mouse p53) given over a period of 6 hrs with 1.5-2 hrs intervals. The analysis was done in normal rats and those with abnormal kidney function since oligonucleotides are mainly excreted through kidney. The siRNA concentration in tissues was measured at 3 hrs and 30 hrs after the last siRNA administration using a quantitative method developed for this particular siRNA molecule. As shown in FIG. 1, siRNA was detected in bone marrow (BM) cells at least as early as 3 h after the last siRNA injection and was one of the highest among the organs tested, ˜40 ng/g tissue (FIG. 1A). The siRNA concentration in BM appeared relatively stable and declined only by 30% over the next 27 hours (FIG. 1B). siRNA retention in BM was similar in both normal and 5/6 nephrectomized rats.

Activity of siRNA in Bone Marrow Cells

[0320] Activity of siRNA in rat BM cells (flushed out from the bone) was tested at 24, 48 and 72 hrs after its single intravenous (i.v.) bolus administration at concentration 12 mg/kg by real-time PCR analysis of the target gene expression. 40% reduction in target gene mRNA level compared to control was detected at 24-48 h after i.v. administration of siRNA (FIG. 2). mRNA levels returned to basal ones by 72 h after administration probably as a result of siRNA clearance or maturation of cells that absorbed siRNA with their subsequent escape from BM into the circulation. A 40% reduction in target gene expression may reflect the fact that only part of BM cells are targeted by siRNA. FIG. 2 shows siRNA activity in rat BM cells 24, 48 and 72 hrs following single bolus intravenous injection. The graph represents expression levels of mRNA targeted by the siRNA. Normal mRNA expression level is shown as 1 (black horizontal line).

Distribution of siRNA in Bone Marrow Cells

[0321] To determine BM mononuclear cell populations (further on, referred as BM cells) that are targeted by siRNA, Cy3-labeled siRNA (REDD14) was injected either intraperitonealy or intravenously to mice at a dose of 72 mg/kg. Distribution of siRNA molecules in the bone marrow and in peripheral blood cells was evaluated 4 h and 24 h following one administration or after two siRNA injections with 24 h intervals between injections (48 h after the first injection). In parallel, Cy3-positive cells were identified based on their unique size, granularity and specific surface markers.

[0322] As shown in FIG. 3, Cy3-siRNA molecules were detected in 11-18% of whole BM cells 24 h following one injection (FIG. 3B) and in more than 30%, 24 h after two siRNA injections with 24 h intervals between injections (FIG. 3C) or 4 h following one siRNA bolus (FIG. 3A).

[0323] The Cy-3-positive BM cells were gated and further identified using antibodies directed to specific cell differentiation markers: Gr1, CD11b, CD11c and CD14 (Granulocytes, monocytes, macrophages, NK, DC and myeloid progenitor cells), B220 (B-cells), c-kit and SCA-1 (hematopoietic stem cells and progenitor cells), TER119 (Erythroid cells), Lin (T and B lymphocytes, monocytes, macrophages, NK cells, erythrocytes and granulocytes). FIG. 4 shows position of various antigen-positive cells on SSC/FSC plots. As shown, the subpopulation that is specifically targeted by siRNA is located in Region 1 (R1) that represents the majority of Gr1-, CD11c- and CD14-positive cells.

[0324] The percentage of Cy3-positive and Cy3-negative cells in each BM cell population was analyzed as follows:

### Lin/SCA1

[0325] The majority of cells in BM are Lin positive (90-94%). Approximately, ˜95% of Cy3-siRNA-positive cells are Lin positive cells.
[0326] Less then 1% of the progenitor SCA1+/Lin− showed siRNA uptake. (SCA1+/Lin-subpopulation constitute 1.4% out of whole BM cells)

### TER119/SCA1

[0327] Approximately 56% of the entire BM cells are TER119-positive cells and 12.5% out of them are progenitor cells expressing SCA1 cells. It appears that 24 h following siRNA injection, 33-45% of the Cy3-positive cells are TER119 positive (which are 2 fold higher compared to 4 h after siRNA injection). The increase in Cy3-siRNA positive cells expressing TER119 especially observed in the mature TER119 cells which are negative to SCA1.

### B220/CD3/SCA1

[0328] B220 positive cells constitute ˜15% of the entire BM cells.
   detection of siRNA in this population reached to 12% 24 h after 2 siRNA ionjections, however this population constitute only 2% out of the entire cells in the BM.
[0329] Approximately 20% of Cy3-siRNA positive cells expressing SCA1, only 1% of them are progenitor B cells (B220+/SCA1+).
[0330] CD3 positive cells constitute ˜9% of the entire BM cells. siRNA-uptake was obtained in no more than 10% CD3 cells which constitute less than 1% of the entire cells in the BM.ckit/SCA1/Gr1
[0331] SCA1 positive cells constitute ˜20% of the entire BM cells, approximately 20-24% of them are Cy3-positive (4% out of entire BM cells).
[0332] Ckit positive cells constitute 5% of the entire BM cells and only 1-2% of them were detected by Cy3 siRNA.
[0333] 13% of SCA1 positive cells, are positive to Gr1 (SCA1+Gr1+) and they constitute 5% out of the entire cells in the BM. 24 h after 2 siRNA injections, 37% of SCA1+/Gr1+ were positive to Cy3.
   CD11b/Cd11c/Gr1
[0334] Approximately 38% of the entire BM cells are CD11b-positive cells and ˜33% are CD11c positive. 8% out of them are positive to both markers.
[0335] The majority of siRNA uptake was observed in CD11c−/CD11b+/Gr1+ population (myeloid progenitor cells, granulocyte, myeloid cells, myeloid DC, Macrophages). This population constitutes approximately 25% of the entire cell population in the BM and approximately 70% of them were Cy3-positive (8% out of total).
[0336] siRNA was also detected in CD11c+/CD11b−/Gr1− population (Lymphoid DC). Approximately 30-55% of them were Cy3 positive (7-14% out of total).

### CD14

[0337] CD14-CD11c+/Gr1− cells constitute 28% of the entire cells in the BM. 40-50% of these cells were found to be Cy3 positive cells (˜15% out of total). No evidence for Cy3 positive cells was shown in peripheral blood white blood cells.

[0338] To better understand which cell population contains the highest level of Cy3-siRNA, Cy3-labeled siRNA was injected intraperitoneally (i.p.) to mice at 72 mg/kg dose. 4 h following injection, mice were sacrificed and BM cells, flushed out from the bones, were sorted to two sub populations based on their FSC/SSC parameters. FIG. 5 shows that the majority of R1 population is Cy3 positive while almost no detection of Cy3 was obtained in R2 population.

[0339] The sorted populations were identified using antibodies directed to specific cell differentiation markers or assessed by morphological features using Giemsa staining. As shown in FIG. 6, the majority of Cy3 positive cells (R1) are mature cells, expressing Gr1+/CD11b+ (92.8% cells in R1 compared to 1.4% cells in R2) and cells expressing Gr1+/CD14+ (26.6% cells in R1 compared to 1.38% cells in R2). Morphological inspection of R1 BM population after cells sorting and Giemsa staining showed enrichment of band population in relation to the whole BM cells (FIG. 7).

[0340] The same experiments are performed in human bone marrow cells using specific human bone marrow cell markers.

### Example 3

### Tumor-Bearing Mouse Model

[0341] Previous studies demonstrated an important role for suppression of antigen-specific T cell responses for Gr1+/CD11b+ cells in tumor-bearing hosts in tumor non-responsiveness. These cells may contribute to the failure of immune therapy in tumor-bearing mice and in patients with advanced stage cancer. Inoculation of transplantable tumor cells results in marked systemic expansion of Gr1+/CD11b+ cells in the bone marrow (BM), spleen and peripheral blood (PB). Therefore, based on the finding that siRNA is preferentially delivered to the Gr1+/CD11b+ cell population in the BM, a model of tumor bearing mice has been established in order to test siRNA delivery to those cells.

[0342] In mice bearing large metastatic Lewis lung carcinoma tumors (LLC1) the Gr1+/CD11b+ population in the BM, PB and spleen was assessed. Significant expansion of Gr1+/CD11b+ population in the BM, spleen and PB was observed 21 days after LLC1 cell transplantation (FIG. 8 A-C). Cy3-labeled siRNA was injected i.p. at a final dose of 72 mg/kg. About 24 h following injection, mice were sacrificed and detection of Cy3 siRNA was measured by FACS in the BM, PB, spleen and tumor. As positive control for siRNA delivery to the BM, a tumor-free mouse was also injected with Cy3-siRNA.

[0343] FIG. 9A shows detection of Cy3 siRNA in the BM of both groups (control and tumor-bearing mice). The majority of the siRNA-positive cells in the BM of tumor-bearing mice are Gr1+/CD11b+ cells (82-92%) (FIG. 9B). In the spleen of tumor-bearing mice, approximately, 12% of the cells were siRNA-positive while no sign of siRNA positive cells were found in the control mouse (FIG. 10A). Again, the majority of siRNA-positive cells were Gr1+/CD11b+ (65%-80) (FIG. 10B).

[0344] When the presence of the siRNA molecules in the PB was examined, the majority population in the PB of tumor-bearing mice was siRNA-positive, while no evidence of siRNA-positive cells was observed in the control mouse (FIG. 11).

[0345] In addition, siRNA-positive cells were found in the tumors. These cells were characterized by specific markers and found to be Gr1+/CD11b+ (90-95% of siRNA positive cells in the tumors) (FIG. 12). (In the same experiment siRNA was injected i.p. at a final dose of 72 mg/kg and the presence of siRNA in the tumor was measured by ISH 3 days after injection.) siRNA was identified in the tumor cells even three days after siRNA injection (data not shown).

[0346] These results demonstrated the delivery of siRNA to the Gr1+/CD11b+ population in mice and more importantly to those specific cells in tumor bearing mice.

### Example 4

### siRNA Delivery to Engrafted Human MonoMac1 Cells

[0347] To study the delivery of siRNA to human leukemic cells in the BM, non-obese diabetic/severe combined immunodeficiency (NOD/SCID) mice were used.

[0348] Methods: About 2×10⁷ human Monocytic leukemic cells (MonoMac1) were injected i.v. into sublethally irradiated NOD/SCID mice. 14 days after cell transplantation, approximately 45% engraftment of human MonoMac1 cells was observed. Cy3-siRNA was than injected i.p. at a dose of 72 mg/kg. After 4 h mice were sacrificed and the level of engraftment was estimated by immunofluorescent staining of CD45 on total BM cells.

[0349] CD45 positive cells were then gated and siRNA detection was measured by FACS using the FL-2 filter.

[0350] Results: As shown in FIG. 13, all the human Monomac1 cells were Cy3 positive (the whole CD45 population shifted in comparison to PBS injected mice). The shift in fluorescence is small but significant in all three injected mice.

### Example 5

### Animal Models for Allograft Transplant Rejection

[0351] One or more of the following animal models is used to test the siRNA compounds of the present invention for efficacy in treating allograft transplant rejection. Other animal models are also suitable. A model for corneal graft rejection: Kagaya et al., Exp Eye Res. 2002. 74(1):131-9. A model for cardiac graft rejection: Kim et al., Am J. Pathol. 2001. 158(3):977-86.

### Example 6

### Chemically Modified siRNA Activity as Tested in BM Cd11b Cells Isolated from Normal Mice

[0352] Casp2 was selected as a target gene in the bone marrow model. The CASP2_{—}4 sequence is disclosed in PCT Publication No. WO 2008/050329, assigned to the assignee of the present invention and hereby incorporated by reference in its entirety. The Casp2_{—}4 siRNA was chemically modified and tested for delivery to and activity in bone marrow cells. The chemically modified compounds are shown in Table C, below.

TABLE C
chemically modified CASP2_4 compounds

| ID | SiRNA compounds 5′->3′ |
|---|---|
| NP | GCCAGAAUGUGGAACUCCU |
| | AGGAGUUCCACAUUCUGGC |
| 45 | a-GCCAGAAUGUGGAAcUC-LC-U |
| | AGGAGUUCCACAUUCUGGC |
| 47 | C6-Im-Pi-GCCAGAAUGUGGAAcUC-LC-U |
| | AGGAGUUCCACAUUCUGGC |
| 90 | GCCAGAAUGUGGAACU-LC-LC-LT |
| | AGGAGUUCCACAUUCUGGC |
| 94 | GCCAGAAUGUGGAACUC-LC-U |
| | AGGAGUUCCACAUUCUGGC |
| 95 | GCCAGAAUGUGGAACU-LC-LC-U |
| | AGGAGUUCCACAUUCUGGC |

Key to Table C: Underlined: 2′OMe modified; small case italicized: DNA; C6-Im-Pi
= C6-Imino-Pi; a: abasic deoxyribo-pseudo-nucleotide; LC: L-deoxyribocytidine, LT:
1_deoxyribothymine

[0353] Methods: BM cells from C57BL/6 mice (male 8-10 weeks old) flushed out from the BM cavity of two femoral and two tibial bones. Epiphysial tissue was removed.

[0354] Bone marrow cavity of 2 femur and 2 tibia were flushed with 8 ml DMEM containing 20% fetal calf serum (FCS). Cells were filtered through a 50 μm mesh and precipitated at 1700 rpm for 10 min 4° C. Cells were then pooled, counted and purified based on their CD11b expression using CD11b (Mac-1) MicroBeads (Cat#130-049-601, Miltenyi Biotec). Cells from each mouse were dissolved in 90 ul bead buffer. Ten microliter (10ul) CD11b beads were then added to each sample (isolated from one mouse). The two samples (represents two mice) were combined and loaded on one magnetic column. Cells were collected and plated in 24 wells plate at final concentration of 1×10⁶ cells per 0.8 ml DMEM containing 20% serum.

[0355] CASP2_{—}4 siRNA compounds, at final concentration of 500 nM, 250 nM, were added to each well. RNA was extracted from CD11b cells 24 and 48 h after siRNA treatment. siRNA activity was tested by CASP2 gene expression by qPCR.

[0356] As shown in Table D, CASP2_{—}4 siRNA treatment leads to reduction in CASP2 gene expression in dose and time dependent manner. Results are shown as residual (% of Ctrl siRNA untreated cells) CASP2 expression

TABLE D
Mouse Casp2 expression as tested in BM purified CD11b+
cells 24 h and 48 h following siRNA treatment.

| | |
|---|---|
| 24 h following | 48 h following |
| siRNA treatment | siRNA treatment |

| siRNA | 250 nM | 500 nM | 250 nM | 500 nM |
|---|---|---|---|---|
| ID | siRNA | siRNA | siRNA | siRNA |
| NP | 60% | 41% | 66% | 44% |
| 45 | 65% | 61% | 45% | 32% |
| 47 | 50% | 66% | 51% | 32% |
| 90 | | 74% | 56% | 19% |
| 94 | 59% | 39% | 35% | 27% |
| 95 | 72% | 57% | 72% | 52% |

### Example 7

### siRNA Delivery to Human Engrafted Umbilical Cord Blood-Derived Cells in NOD/SCID Mice

[0357] Xenotransplantation systems are useful in initiating and maintaining the hematopoietic system in vivo. The nonobese diabetic/severe combined immuno-deficiency (NOD/SCID) mouse has been a useful model as a recipient for human BM cells growth. Cells from BM (Bone Marrow), PB (Peripheral Blood) and CB (Cord Blood) are used in in-vivo models for repopulating the BM of NOD/SCID mice (Guenechea et al., Blood. 1999, 93:1097-105; Glimm H et al., J Clin Invest. 2001, 107:199-206; Shultz L D, et al., J. Immunol. 1995, 154:180-91). Transplantation of human umbilical CB results in the engraftment of primitive cells that proliferate and differentiate to multiple lineages in the chimeric BM mouse (Bhatia M, et al. PNAS USA. 1997, 94:5320-5).

[0358] Human mononuclear cells (MNC's) were obtained from a CB specimen by density gradient centrifugation using Ficoll-Paque. Recipient NOD/SCID mice (NOD/LtSzPrKdc^{scid}/PrKdc^{scid}) were irradiated with a sublethal dose (350 cGy) from a cesium source 24 h before intravenously injection of the purified MNC (2×10⁷). Six weeks later BM cells flushed from both femur and tibia bones were harvested and resuspended into single-cell suspension. The percentage of human cells was determined by FACS following immunostaining with anti-human CD45-FITC Mab.

[0359] According to the yield of engraftment (80% human positive cells), Cy3 labeled siRNA was injected intraperitoneally (i.p) at final dose of 72 mg/kg to two chimeric mice. Chimeric mice were sacrificed 24 h following siRNA injection, and siRNA delivery to human cells in the BM, PB and Spleen was measured by FACS using FL-2 filter. The percentage of human cells in the BM of Cy3 siRNA injected chimeric mice (mouse #1 and #2) was 75% and 69%, respectively. Cy3 siRNA was detected in 69% and 39% out of the human engrafted cells, respectively (FIG. 14A). No sign of Cy3-siRNA positive cells was observed in the CD45 positive cells in the PB (FIG. 14B) or Spleen (FIG. 14C) of the chimeric mice.

[0360] The distribution of siRNA in BM human cells was analyzed by FACS following immunostaining with specific Abs directed to CD11b, CD33, CD14, CD10

[0361] Results: Tables E1-E3 show percentage of Cy3-siRNA positive human BM cells by their surface markers. The presence of Cy3 labeled siRNA was also tested in CD34−/CD38+ (Hematopoietic Stem Cells) or in progenitor stem cells CD34+/CD38+ but only part of these cells was found to be positive for siRNA.

TABLE E1

| | CD33+/CD11b+/ | CD33+/CD45+/ | CD11b+/CD45+/ |
|---|---|---|---|
| | CD45+ | siRNA+ | siRNA+ |
| Mouse | 32% | 16% (7% out of 23% | 33% (10% of human |
| #2 | | CD33+ cells | CD11b+ cells |
| | | were siRNA−) | were siRNA−) |
| Mouse | 23% | 34% (Only 50% | 19% (5% of human |
| #1 | | of CD33+ cells | CD11b+ cells |
| | | were siRNA+) | siRNA−) |

TABLE E2

| | CD33+/CD14+/CD45+ | CD14+/CD45+/siRNA+ |
|---|---|---|
| Mouse #2 | 11% | 63% of CD14 were siRNA+ |
| Mouse #1 | 17% | 50% of CD14 were siRNA+ |

TABLE E3

| | CD10+/CD45+ | CD10+CD45+/siRNA+ |
|---|---|---|
| Mouse #2 | 43% | 72% of CD10 were siRNA+ |
| Mouse #1 | 36% | 41% of CD10 were siRNA+ |

### Example 8

### CD11b+/Gr1+ Cell Expansion in Tumor Bearing NOD/SCID Mice

[0362] The majority of systemically delivered siRNA compounds target CD11b+/Gr1+BM cells of normal and tumor bearing mice and approximately 90% of human CD11b+ cells. A NOD/SCID tumor bearing chimeric mice model was established to test the (i) efficacy of the siRNA to reach the target cells and (ii) activity of siRNA in the target cells.

[0363] Methods: Expansion of CD11b+/Gr1+ cells in NOD/SCID-bearing human tumor cells was tested. NOD.Cg-Prkdc^{scid}B2m^{tm1Unc}/J, (NOD/SCID/2 null) mice were injected subcutaneously (s.c) with 5×10⁵ human HCT116 tumor cells or PC-3 prostate tumor cells. Approximately two months later when HCT116 tumor volume was 1 cm³ the mice were sacrificed and the CD11b+Gr1+ cells were quantified in the BM and the spleen (PC-3 injected mice do not developed tumors).

[0364] Results: FIGS. 15A-15B show CD11b+/Gr1+ cells expansion in the BM (15A) and the spleen (15B) of NOD/SCID/2 null mouse-bearing HCT116 tumor cells.

[0365] About 70% and 37% are CD11b+Gr1+ cells in the BM and the spleen of mice bearing HCT116 cells, respectively compared to 10-26% and 12-20% CD11b+/Gr1+ cells in the BM and the Spleen, respectively of mice injected with human PC-3 tumor cells.

### Example 9

### Gene Profile of Cd11b Cells from the BM and the Tumor of LLC1-TBM

[0366] Target gene expression level in a LLC1-TBM model was analyzed.

[0367] Methods: Approximately 9-10 week old C57BL/6 mice were injected s.c with LLC1 (Lewis lung carcinoma) cells. At days 14, 16, 18 and 21 mice were sacrificed and CD11b+ cells were purified from the BM and the tumor tissue using CD11b (Mac-1) MicroBeads. The expression level of CD80, MMP9, TGFb, PROK2, Arg1 and NOS2A was tested by qPCR at each time point.

[0368] Results: The gene expression results of BM CD11b+ cells were compared to those observed from the same cells isolated from Ctrl normal mice while the expression level of the tested gene in the tumor are presented as absolute number (expression of gene candidate normalized to reference gene).

[0369] As shown Table F1, there is significant induction in BM CD11b+ cells of CD80 (1.5-1.7 fold at days 14-16 and ×9 fold at day 21), MMP9 (1.5-1.9 fold induction), TGFb (induction of 2 fold at day 14), PROK2 (approximately 4-7.5 fold induction) and NOS2A genes (approximately 10-60 fold induction) compared to Ctrl cells.

TABLE F1
Gene expression in BM purified CD11b cells (n = 3)

| | CD80 | MMP9 | TGFb | PROK2 | ARG1 | NOS2 |
|---|---|---|---|---|---|---|
| Ctrl_Cd11b+ | 1.00 | 1.00 | 1.00 | 1.00 | 1.00 | 1.00 |
| _Normal mice | | | | | | |
| BM_Cd11b+ | 1.70 | 1.98 | 2.08 | 3.89 | 0.63 | 10.00 |
| 14 d | | | | | | |
| BM_Cd11b+ | 1.57 | 1.79 | 1.34 | 6.99 | 0.37 | 2.95 |
| 16 d | | | | | | |
| BM_Cd11b+ | 0.57 | 0.75 | 0.57 | 4.11 | 0.09 | 13.71 |
| 18 d | | | | | | |
| BM_Cd11b+ | 9.25 | 1.59 | 0.94 | 7.65 | 0.26 | 64.53 |
| 21 d | | | | | | |

[0370] A similar trend was observed for CD11b+ cells from the LLC1 tumor. Table F2 shows that CD80, MMP9 and PROK2 were induced from day 18, NOS2A was induced already at day 16 and TGFb was induced only at day 18. Induction of Arg1 expression was seen in tumor-CD11b cells but not in BM-CD11b cells.

TABLE F2
Gene expression in tumor-CD11b cells

| | CD80 | MMP9 | TGFb | PROK2 | ARG1 | NOS2 |
|---|---|---|---|---|---|---|
| T_Cd11b+ 14 d | 0.44 | 0.01 | 0.22 | 0.01 | | 0.09 |
| T_Cd11b+ 16 d | 0.37 | 0.01 | 0.21 | 0.00 | 0.10 | 0.15 |
| T_Cd11b+ 18 d | 0.77 | 0.04 | 1.20 | 0.02 | 0.18 | 0.09 |
| T_Cd11b+ 21 d | 2.75 | 0.04 | 0.76 | 0.09 | 0.20 | 0.44 |

### Example 10

### siRNA Directed to Partial List of the Targeted Genes

[0371] Some siRNA compounds targeting CD80 (SEQ ID NOS:24,076-24,087), TGFβ1 (SEQ ID NOS:24,088-24,095), Arg1 (SEQ ID NOS:24,96-24,099), NOS2A (SEQ ID NOS:24,100-24,103) and PROK2 (SEQ ID NOS:24, 104-24117) are shown in Table G.

TABLE G
siRNA to CD80, TGFβ, Arg1, NOS2A and PROK2

| | sense | antisense |
|---|---|---|
| si_ID | sequence 5′-3′ | sequence 5′-3′ |
| CD80_10 | GAGAACUAUCCAAAACUAA | UUAGUUUUGGAUAGUUCUC |
| CD80_11 | GGAGGUGACCCGAAUUAUA | UAUAAUUCGGGUCACCUCC |
| CD80_12 | GCAGUAAGCUAUCUUCAAA | UUUGAAGAUAGCUUACUGC |
| CD80_13 | CAGAGAGGUCUAACACCAA | UUGGUGUUAGACCUCUCUG |
| CD80_14 | GAGACUAUCUGAUUUCCUA | UAGGAAAUCAGAUAGUCUC |
| CD80_15 | GAUCGUUGUUUACAGUGUA | UACACUGUAAACAACGAUC |
| TGFb1_12 | CCUACAUUUGGAGCCUGGA | UCCAGGCUCCAAAUGUAGG |
| TGFb1_13 | CGGCAGCUGUACAUUGACU | AGUCAAUGUACAGCUGCCG |
| TGFb1_14 | GGCAGCUGUACAUUGACUU | AAGUCAAUGUACAGCUGCC |
| TGFb1_15 | CACACAGCAUAUAUAUGUU | AACAUAUAUAUGCUGUGUG |
| Arg1_1 | CCUUUCAAAUUGUGAAGAA | UUCUUCACAAUUUGAAAGG |
| Arg1_2 | GUCUCUACAUCACAGAAGA | UCUUCUGUGAUGUAGAGAC |
| NOS2A_1 | CAUAGUUUCCAGAAGCAGA | UCUGCUUCUGGAAACUAUG |
| NOS2A_2 | GCGCCUUUGCUCAUGACAU | AUGUCAUGAGCAAAGGCGC |
| PROK2_9 | GGGUCAAGAGCAUAAGGAU | AUCCUUAUGCUCUUGACCC |
| PROK2_10 | CUAGAAAAUGUCACUUGAA | UUCAAGUGACAUUUUCUAG |
| PROK2_11 | GCCACAUCUUACCUGUAAA | UUUACAGGUAAGAUGUGGC |
| PROK2_12 | CAAAAGUAAUCGCUCUGGA | UCCAGAGCGAUUACUUUUG |
| PROK2_13 | CUGUCAGUAUCUGGGUCAA | UUGACCCAGAUACUGACAG |
| PROK2_14 | CCAUCCACUGACUCGUAAA | UUUACGAGUCAGUGGAUGG |
| PROK2_15 | CCUUAGUCUCCUACUUAGA | UCUAAGUAGGAGACUAAGG |

[0372] Transfection protocol for PROK2 siRNA: Approximately 2×10⁵ human Saos2 cells (human osteosarcoma) expressing the endogenous PROK2 gene were seeded per well in 6 wells plate (70-80% confluent).

[0373] Cells were transfected with siRNA oligos 24 h later using Lipofectamine 2000™ reagent (Invitrogene) according manufacturer's procedure, at final concentration of 500 pM, 5 nM and 20 nM. Cells were harvested 72 h after transfection, RNA was extracted from cells and PROK2 gene expression was tested by qPCR. Activity is presented as residual (% of Ctrl) human PROK2 expression in Saos2 cells (Table H).

TABLE H
PROK2 expression in Saos2 cells as tested
by qPCR following siRNA transfection.

| | | | |
|---|---|---|---|
| Ctrl | | | 100 |
| PROK2_9 | 20 | nM | 11 |
| | 5 | nM | 18 |
| | 0.5 | nM | 73 |
| PROK2_10 | 20 | nM | 28 |
| | 5 | nM | 40 |
| | 0.5 | nM | |
| PROK2_11 | 20 | nM | 5 |
| | 5 | nM | 21 |
| | 0.5 | nM | 67 |
| PROK2_12 | 20 | nM | 28 |
| | 5 | nM | 19 |
| | 0.5 | nM | |
| PROK2_13 | 20 | nM | 20 |
| | 5 | nm | 48 |
| | 0.5 | nM | |
| PROK2_14 | 20 | nM | 6 |
| | 5 | nm | 20 |
| | 0.5 | nM | 81 |
| PROK2_15 | 20 | nM | 47 |
| | 5 | nm | 32 |
| | 0.5 | nM | |

### Example 11

### Cy3-siRNA Positive Tumor CD11b Cells

[0374] Example 3 hereinabove demonstrates (by FACS) that the majority of Cy3 positive cells following administration of Cy3-siRNA are CD11b+Gr1+ cells (FIG. 12). In the present experiment CD11b+ cells were purified from the tumor and the presence of siRNA in these cells was shown by confocal microscopy.

[0375] Methods: C57BL/6 mice (9-10 weeks old) were injected s.c with LLC1 cells, 20 days later, Cy3-labeled siRNA oligo was injected i.p at final dose of 72 mg/kg. 24 h after siRNA injection, CD11b+ cells were purified from the tumor tissue using CD11b (Mac-1) Microbeads. Cells were than stained by FITC-conjugated CD11b and PerCP-Cy5.5-conjugated Gr1 Abs to determine yield of purification. After staining, cells were fixed with 4% PFA and presence of siRNA was observed by confocal microscopy.

[0376] FIG. 16A shows that the yield of CD11b+/Gr1+ purified cells was 81% and yield of CD11b+/Gr1− purified cells was 9%.

[0377] FIG. 16B shows siRNA detection in CD11b+ cells from the tumor tissue by Confocal microscopy. Arrows show some of the labeled siRNA (left most figures) and labeled cells (center figures). The right-most figures show merging of the siRNA and cells.

### Example 12

### Microarray Data—Gene Profile of BM and Tumor Cd11b+/Gr1+Cells from Mice Bearing Human Tumors

[0378] Microarray analysis is performed to identify gene expression pattern in the CD11b+/CD33+ cells and the associated tumors.

1. A method of treating a disorder associated with immature myeloid cell expansion and/or mobilization in a subject in need of such treatment which comprises systemically administering to the subject a therapeutically effective amount of an siRNA directed to a target gene associated with the disorder in an amount effective to treat the subject.

2. The method of claim 1, wherein the immature myeloid cell is a CD33+/CD11b+ cell.

3. The method of claim 1, wherein the disorder associated with immature myeloid cell expansion and/or mobilization is tumorigenesis, tumor progression, tumor neoangiogenesis, tumor resistance, or allograft rejection.

4. (canceled)

5. The method of claim 3, wherein the disorder is a solid tumor, a hematopoietic tumor of a myeloid lineage or a head and neck, breast, lung, kidney, prostate, colon or pancreatic tumor.

6-7. (canceled)

8. The method of claim 1 further comprising administering a chemotherapeutic agent to the subject.

9. The method of claim 3, wherein disorder is an allograft rejection.

10. The method of claim 1, wherein the siRNA is a chemically modified siRNA.

11. The method of claim 10, wherein the chemically modified siRNA is chemically modified according to any one of structural motifs (A)-(P).

12. (canceled)

13. The method of claim 1, wherein the siRNA is a naked siRNA.

14. The method of claim 1, wherein the target gene is selected from the group consisting of genes for which the corresponding mRNA has a sequence set forth in any one of SEQ ID NOS: 1-86.

15. The method of claim 1, wherein the target gene is CD80, MMP9, PROK2, NOS2A, ARG1, TGFβ2, or CD86.

16. (canceled)

17. The method of claim 1, wherein the siRNA comprises an antisense sequence present in Tables B (1-B25; SEQ ID NO:90-24,075) or Table G (SEQ ID NO:24,076-24,117).

18. A method of treating a cancer in a subject in need thereof which comprises systemically administering to the subject a therapeutically effective amount of an oligonucleotide which inhibits expression of a target gene expressed in an immature myeloid cell in the subject in an amount effective to treat the subject.

19. A method of reducing immature myeloid cell expansion or mobilization in a subject in need thereof which comprises systemically administering to the subject a therapeutically effective amount of an oligonucleotide which inhibits expression of a target gene expressed in the immature myeloid cell in an amount effective to reduce immature myeloid cell expansion or mobilization.

20. A method of treating a subject suffering from a disorder in which the level of T cell receptor zeta chain (CD3ζ) is reduced or absent which comprises systemically administering to the subject an oligonucleotide which inhibits expression of a target gene expressed in an immature myeloid cell in the subject in an amount effective to treat the subject.

21. A method of reducing tumor vascularization and tumor progression in a subject in need thereof which comprises systemically administering to the subject a therapeutically effective amount of an oligonucleotide which inhibits expression of a target gene expressed in an immature myeloid cell in the subject in an amount effective to reduce tumor vascularization and tumor progression.

22. A method of preventing transplant rejection in a subject in need thereof which comprises systemically administering to the subject a therapeutically effective amount of an oligonucleotide which inhibits expression of a target gene expressed in an immature myeloid cell in the subject in an amount effective to treat the subject.

23. A method of delivering an oligonucleotide to a CD11b+ immature myeloid cell in a subject in need thereof which comprises administering systemically to the subject a therapeutically effective amount of an oligonucleotide which inhibits expression of a target gene expressed in the immature myeloid cell in an amount effective to achieve delivery to the CD11b+ immature myeloid cell.

24-32. (canceled)

33. A compound set forth as Structure (A):

| | |
|---|---|
| (A) | 5′ (N)ₓ-Z 3′ (antisense strand) |
| | 3′ Z′-(N′)_{y} 5′ (sense strand) |

wherein each of N and N′ is a nucleotide selected from an unmodified ribonucleotide, a modified ribonucleotide, an unmodified deoxyribonucleotide and a modified deoxyribonucleotide;
wherein each of (N)ₓ and (N′)_{y} is an oligonucleotide in which each consecutive N or N′ is joined to the next N or N′ by a covalent bond;
wherein each of x and y is an integer between 18 and 40;
wherein each of Z and Z′ may be present or absent, but if present is 1-5 consecutive nucleotides covalently attached at the 3′ terminus of the strand in which it is present; wherein the sequence of (N′)_{y} is present within an mRNA expressed in an immature myeloid cell; and wherein the sequence of the mRNA is set forth in Tables A1 and A2 (SEQ ID NOS:1-89).

34. A compound having Structure (I) set forth below:

| | |
|---|---|
| (I) | 5′ (N)x-Z 3′ (antisense strand) |
| | 3′ Z′-(N′)y-z″ 5′ (sense strand) |

wherein each of N and N′ is a ribonucleotide which may be unmodified or modified, or an unconventional moiety;
wherein each of (N)x and (N′)y is an oligonucleotide in which each consecutive N or N′ is joined to the next N or N′ by a covalent bond;
wherein Z and Z′ may be present or absent, but if present is independently 1-5 consecutive nucleotides covalently attached at the 3′ terminus of the strand in which it 5 is present;
wherein z″ may be present or absent, but if present is a capping moiety covalently attached at the 5′ terminus of (N′)y;
wherein each of x and y are independently 18 to 27;
wherein (N)x comprises modified and unmodified ribonucleotides, each modified ribonucleotide having a 2′-O-methyl on its sugar, wherein N at the 3′ terminus of (N)x is a modified ribonucleotide, (N)x comprises at least five alternating modified ribonucleotides beginning at the 3′ end and at least nine modified ribonucleotides in total and each remaining N is an unmodified ribonucleotide;
wherein in (N′)y at least one unconventional moiety is present, which unconventional moiety may be an abasic ribose moiety, an abasic deoxyribose moiety, a modified or unmodified deoxyribonucleotide, a mirror nucleotide, and a nucleotide joined to an adjacent nucleotide by a 2′-5′ internucleotide phosphate bond; and
wherein the sequence of (N)x is substantially complementary to the sequence of (N′)y; and the sequence of (N′)y is substantially identical to the sequence of an mRNA set forth in Tables A1 and A2 (SEQ ID NOS:1-89).

35-37. (canceled)

38. A method of treating a disorder associated with immature myeloid cell expansion and/or mobilization in a subject in need of such treatment which comprises systemically administering to the subject therapeutically effective amount of an siRNA according to claim 33 in an amount effective to treat the subject.

39. A method of treating a disorder associated with immature myeloid cell expansion and/or mobilization in a subject in need of such treatment which comprises systemically administering to the subject a therapeutically effective amount of an siRNA according to claim 34 in an amount effective to treat the subject.

The application's sequence listing, which the Patent Office published only in electronic form, follows.

SEQUENCE LISTING (24117 sequences)

SEQ ID NO: 1 - DNA, 2124 bp, Artificial
  Oligomer
atgagcctctggcagcccctggtcctggtgctcctggtgctgggctgctgctttgctgcccccagacagcgccagtccacccttgtgctcttccctggagacctgagaaccaatctcaccgacaggcagctggcagaggaatacctgtaccgctatggttacactcgggtggcagagatgcgtggagagtcgaaatctctggggcctgcgctgctgcttctccagaagcaactgtccctgcccgagaccggtgagctggatagcgccacgctgaaggccatgcgaaccccacggtgcggggtcccagacctgggcagattccaaacctttgagggcgacctcaagtggcaccaccacaacatcacctattggatccaaaactactcggaagacttgccgcgggcggtgattgacgacgcctttgcccgcgccttcgcactgtggagcgcggtgacgccgctcaccttcactcgcgtgtacagccgggacgcagacatcgtcatccagtttggtgtcgcggagcacggagacgggtatcccttcgacgggaaggacgggctcctggcacacgcctttcctcctggccccggcattcagggagacgcccatttcgacgatgacgagttgtggtccctgggcaagggcgtcgtggttccaactcggtttggaaacgcagatggcgcggcctgccacttccccttcatcttcgagggccgctcctactctgcctgcaccaccgacggtcgctccgacggcttgccctggtgcagtaccacggccaactacgacaccgacgaccggtttggcttctgccccagcgagagactctacacccaggacggcaatgctgatgggaaaccctgccagtttccattcatcttccaaggccaatcctactccgcctgcaccacggacggtcgctccgacggctaccgctggtgcgccaccaccgccaactacgaccgggacaagctcttcggcttctgcccgacccgagctgactcgacggtgatggggggcaactcggcgggggagctgtgcgtcttccccttcactttcctgggtaaggagtactcgacctgtaccagcgagggccgcggagatgggcgcctctggtgcgctaccacctcgaactttgacagcgacaagaagtggggcttctgcccggaccaaggatacagtttgttcctcgtggcggcgcatgagttcggccacgcgctgggcttagatcattcctcagtgccggaggcgctcatgtaccctatgtaccgcttcactgaggggccccccttgcataaggacgacgtgaatggcatccggcacctctatggtcctcgccctgaacctgagccacggcctccaaccaccaccacaccgcagcccacggctcccccgacggtctgccccaccggaccccccactgtccacccctcagagcgccccacagctggccccacaggtcccccctcagctggccccacaggtccccccactgctggcccttctacggccactactgtgcctttgagtccggtggacgatgcctgcaacgtgaacatcttcgacgccatcgcggagattgggaaccagctgtatttgttcaaggatgggaagtactggcgattctctgagggcagggggagccggccgcagggccccttccttatcgccgacaagtggcccgcgctgccccgcaagctggactcggtctttgaggagcggctctccaagaagcttttcttcttctctgggcgccaggtgtgggtgtacacaggcgcgtcggtgctgggcccgaggcgtctggacaagctgggcctgggagccgacgtggcccaggtgaccggggccctccggagtggcagggggaagatgctgctgttcagcgggcggcgcctctggaggttcgacgtgaaggcgcagatggtggatccccggagcgccagcgaggtggaccggatgttccccggggtgcctttggacacgcacgacgtcttccagtaccgagagaaagcctatttctgccaggaccgcttctactggcgcgtgagttcccggagtgagttgaaccaggtggaccaagtgggctacgtgacctatgacatcctgcagtgccctgaggactag

SEQ ID NO: 2 - DNA, 1550 bp, Homo sapiens
gccggcgtgagtcacggcggggctagcctttataacggcccggaggctcgcgggagccgccgcgcccgtccgcccgccgctccgcgctccacccagcgcacccgggccccgcgcccccaactgcctccggcggccgcccagtcccgagggcgccatgaggagcctgtgctgcgccccactcctgctcctcttgctgctgccgccgctgctgctcacgccccgcgctggggacgccgccgtgatcaccggggcttgtgacaaggactcccaatgtggtggaggcatgtgctgtgctgtcagtatctgggtcaagagcataaggatttgcacacctatgggcaaactgggagacagctgccatccactgactcgtaaagttccattttttgggcggaggatgcatcacacttgcccatgtctgccaggcttggcctgtttacggacttcatttaaccgatttatttgtttagcccaaaagtaatcgctctggagtagaaaccaaatgtgaatagccacatcttacctgtaaagtcttacttgtgattgtgccaaacaaaaaatgtgccagaaagaaatgctcttgcttcctcaactttccaagtaacatttttatctttgatttgtaaatgatttttttttttttttatcgaaagagaattttacttttggatagaaatatgaagtgtaaggcattatggaactggttcttatttccctgtttgtgttttggtttgatttggcttttttcttaaatgtcaaaaacgtacccattttcacaaaaatgaggaaaataagaatttgatattttgttagaaaaacttttttttttttttctcaccaccccaagccccatttgtgccctgccacacaaatacacctacagcttttggtcccttgcctcttccacctcaaagaatttcaaggctcttaccttactttatttttgtccatttctcttccctcctcttgcattttaaagtggagggtttgtctctttgagtttgatggcagaatcactgatgggaatccagctttttgctggcatttaaatagtgaaaagagtgtatatgtgaacttgacactccaaactcctgtcatggcacggaagctaggagtgctgctggacccttcctaaacctgtcactcaagaggacttcagctctgctgttgggctggtgtgtggacagaaggaatggaaagccaaattaatttagtccagatttctaggtttgggtttttctaaaaataaaagattacatttacttcttttactttttataaagttttttttccttagtctcctacttagagatattctagaaaatgtcacttgaagaggaagtatttattttaatctggcacaacactaattaccatttttaaagcagtattaagttgtaatttaaaccttgtttgtaactgaaaggtcgattgtaatggattgccgtttgtacctgtatcagtattgctgtgtaaaaattctgtatcagaataataacagtactgtatatcatttgatttattttaatattatatccttatttttgtca

SEQ ID NO: 3 - DNA, 969 bp, Homo sapiens
atgagcgccaagtccagaaccatagggattattggagctcctttctcaaagggacagccacgaggaggggtggaagaaggccctacagtattgagaaaggctggtctgcttgagaaacttaaagaacaagagtgtgatgtgaaggattatggggacctgccctttgctgacatccctaatgacagtccctttcaaattgtgaagaatccaaggtctgtgggaaaagcaagcgagcagctggctggcaaggtggcagaagtcaagaagaacggaagaatcagcctggtgctgggcggagaccacagtttggcaattggaagcatctctggccatgccagggtccaccctgatcttggagtcatctgggtggatgctcacactgatatcaacactccactgacaaccacaagtggaaacttgcatggacaacctgtatctttcctcctgaaggaactaaaaggaaagattcccgatgtgccaggattctcctgggtgactccctgtatatctgccaaggatattgtgtatattggcttgagagacgtggaccctggggaacactacattttgaaaactctaggcattaaatacttttcaatgactgaagtggacagactaggaattggcaaggtgatggaagaaacactcagctatctactaggaagaaagaaaaggccaattcatctaagttttgatgttgacggactggacccatctttcacaccagctactggcacaccagtcgtgggaggtctgacatacagagaaggtctctacatcacagaagaaatctacaaaacagggctactctcaggattagatataatggaagtgaacccatccctggggaagacaccagaagaagtaactcgaacagtgaacacagcagttgcaataaccttggcttgtttcggacttgctcgggagggtaatcacaagcctattgactaccttaacccacctaagtaa

SEQ ID NO: 4 - DNA, 3462 bp, Homo sapiens
atggcctgtccttggaaatttctgttcaagaccaaattccaccagtatgcaatgaatggggaaaaagacatcaacaacaatgtggagaaagccccctgtgccacctccagtccagtgacacaggatgaccttcagtatcacaacctcagcaagcagcagaatgagtccccgcagcccctcgtggagacgggaaagaagtctccagaatctctggtcaagctggatgcaaccccattgtcctccccacggcatgtgaggatcaaaaactggggcagcgggatgactttccaagacacacttcaccataaggccaaagggattttaacttgcaggtccaaatcttgcctggggtccattatgactcccaaaagtttgaccagaggacccagggacaagcctacccctccagatgagcttctacctcaagctatcgaatttgtcaaccaatattacggctccttcaaagaggcaaaaatagaggaacatctggccagggtggaagcggtaacaaaggagatagaaacaacaggaacctaccaactgacgggagatgagctcatcttcgccaccaagcaggcctggcgcaatgccccacgctgcattgggaggatccagtggtccaacctgcaggtcttcgatgcccgcagctgttccactgcccgggaaatgtttgaacacatctgcagacacgtgcgttactccaccaacaatggcaacatcaggtcggccatcaccgtgttcccccagcggagtgatggcaagcacgacttccgggtgtggaatgctcagctcatccgctatgctggctaccagatgccagatggcagcatcagaggggaccctgccaacgtggaattcactcagctgtgcatcgacctgggctggaagcccaagtacggccgcttcgatgtggtccccctggtcctgcaggccaatggccgtgaccctgagctcttcgaaatcccacctgaccttgtgcttgaggtggccatggaacatcccaaatacgagtggtttcgggaactggagctaaagtggtacgccctgcctgcagtggccaacatgctgcttgaggtgggcggcctggagttcccagggtgccccttcaatggctggtacatgggcacagagatcggagtccgggacttctgtgacgtccagcgctacaacatcctggaggaagtgggcaggagaatgggcctggaaacgcacaagctggcctcgctctggaaagaccaggctgtcgttgagatcaacattgctgtgctccatagtttccagaagcagaatgtgaccatcatggaccaccactcggctgcagaatccttcatgaagtacatgcagaatgaataccggtcccgtgggggctgcccggcagactggatttggctggtccctcccatgtctgggagcatcacccccgtgtttcaccaggagatgctgaactacgtcctgtcccctttctactactatcaggtagaggcctggaaaacccatgtctggcaggacgagaagcggagacccaagagaagagagattccattgaaagtcttggtcaaagctgtgctctttgcctgtatgctgatgcgcaagacaatggcgtcccgagtcagagtcaccatcctctttgcgacagagacaggaaaatcagaggcgctggcctgggacctgggggccttattcagctgtgccttcaaccccaaggttgtctgcatggataagtacaggctgagctgcctggaggaggaacggctgctgttggtggtgaccagtacgtttggcaatggagactgccctggcaatggagagaaactgaagaaatcgctcttcatgctgaaagagctcaacaacaaattcaggtacgctgtgtttggcctcggctccagcatgtaccctcggttctgcgcctttgctcatgacattgatcagaagctgtcccacctgggggcctctcagctcaccccgatgggagaaggggatgagctcagtgggcaggaggacgccttccgcagctgggccgtgcaaaccttcaaggcagcctgtgagacgtttgatgtccgaggcaaacagcacattcagatccccaagctctacacctccaatgtgacctgggacccgcaccactacaggctcgtgcaggactcacagcctttggacctcagcaaagccctcagcagcatgcatgccaagaacgtgttcaccatgaggctcaaatctcggcagaatctacaaagtccgacatccagccgtgccaccatcctggtggaactctcctgtgaggatggccaaggcctgaactacctgccgggggagcaccttggggtttgcccaggcaaccagccggccctggtccaaggtatcctggagcgagtggtggatggccccacaccccaccagacagtgcgcctggaggccctggatgagagtggcagctactgggtcagtgacaagaggctgcccccctgctcactcagccaggccctcacctacttcctggacatcaccacacccccaacccagctgctgctccaaaagctggcccaggtggccacagaagagcctgagagacagaggctggaggccctgtgccagccctcagagtacagcaagtggaagttcaccaacagccccacattcctggaggtgctagaggagttcccgtccctgcgggtgtctgctggcttcctgctttcccagctccccattctgaagcccaggttctactccatcagctcctcccgggatcacacgcccacagagatccacctgactgtggccgtggtcacctaccacacccgagatggccagggtcccctgcaccacggcgtctgcagcacatggctcaacagcctgaagccccaagacccagtgccctgctttgtgcggaatgccagcggcttccacctccccgaggatccctcccatccttgcatcctcatcgggcctggcacaggcatcgcgcccttccgcagtttctggcagcaacggctccatgactcccagcacaagggagtgcggggaggccgcatgaccttggtgtttgggtgccgccgcccagatgaggaccacatctaccaggaggagatgctggagatggcccagaagggggtgctgcatgcggtgcacacagcctattcccgcctgcctggcaagcccaaggtctatgttcaggacatcctgcggcagcagctggccagcgaggtgctccgtgtgctccacaaggagccaggccacctctatgtttgcggggatgtgcgcatggcccgggacgtggcccacaccctgaagcagctggtggctgccaagctgaaattgaatgaggagcaggtcgaggactatttctttcagctcaagagccagaagcgctatcacgaagatatctttggtgctgtatttccttacgaggcgaagaaggacagggtggcggtgcagcccagcagcctggagatgtcagcgctctga

SEQ ID NO: 5 - DNA, 1173 bp, Homo sapiens
atgccgccctccgggctgcggctgctgccgctgctgctaccgctgctgtggctactggtgctgacgcctggccggccggccgcgggactatccacctgcaagactatcgacatggagctggtgaagcggaagcgcatcgaggccatccgcggccagatcctgtccaagctgcggctcgccagccccccgagccagggggaggtgccgcccggcccgctgcccgaggccgtgctcgccctgtacaacagcacccgcgaccgggtggccggggagagtgcagaaccggagcccgagcctgaggccgactactacgccaaggaggtcacccgcgtgctaatggtggaaacccacaacgaaatctatgacaagttcaagcagagtacacacagcatatatatgttcttcaacacatcagagctccgagaagcggtacctgaacccgtgttgctctcccgggcagagctgcgtctgctgaggctcaagttaaaagtggagcagcacgtggagctgtaccagaaatacagcaacaattcctggcgatacctcagcaaccggctgctggcacccagcgactcgccagagtggttatcttttgatgtcaccggagttgtgcggcagtggttgagccgtggaggggaaattgagggctttcgccttagcgcccactgctcctgtgacagcagggataacacactgcaagtggacatcaacgggttcactaccggccgccgaggtgacctggccaccattcatggcatgaaccggcctttcctgcttctcatggccaccccgctggagagggcccagcatctgcaaagctcccggcaccgccgagccctggacaccaactattgcttcagctccacggagaagaactgctgcgtgcggcagctgtacattgacttccgcaaggacctcggctggaagtggatccacgagcccaagggctaccatgccaacttctgcctcgggccctgcccctacatttggagcctggacacgcagtacagcaaggtcctggccctgtacaaccagcataacccgggcgcctcggcggcgccgtgctgcgtgccgcaggcgctggagccgctgcccatcgtgtactacgtgggccgcaagcccaaggtggagcagctgtccaacatgatcgtgcgctcctgcaagtgcagctga

SEQ ID NO: 6 - DNA, 2139 bp, Homo sapiens
atgtctcagtggtacgaacttcagcagcttgactcaaaattcctggagcaggttcaccagctttatgatgacagttttcccatggaaatcagacagtacctggcacagtggttagaaaagcaagactgggagcacgctgccaatgatgtttcatttgccaccatccgttttcatgacctcctgtcacagctggatgatcaatatagtcgcttttctttggagaataacttcttgctacagcataacataaggaaaagcaagcgtaatcttcaggataattttcaggaagacccaatccagatgtctatgatcatttacagctgtctgaaggaagaaaggaaaattctggaaaacgcccagagatttaatcaggctcagtcggggaatattcagagcacagtgatgttagacaaacagaaagagcttgacagtaaagtcagaaatgtgaaggacaaggttatgtgtatagagcatgaaatcaagagcctggaagatttacaagatgaatatgacttcaaatgcaaaaccttgcagaacagagaacacgagaccaatggtgtggcaaagagtgatcagaaacaagaacagctgttactcaagaagatgtatttaatgcttgacaataagagaaaggaagtagttcacaaaataatagagttgctgaatgtcactgaacttacccagaatgccctgattaatgatgaactagtggagtggaagcggagacagcagagcgcctgtattggggggccgcccaatgcttgcttggatcagctgcagaactggttcactatagttgcggagagtctgcagcaagttcggcagcagcttaaaaagttggaggaattggaacagaaatacacctacgaacatgaccctatcacaaaaaacaaacaagtgttatgggaccgcaccttcagtcttttccagcagctcattcagagctcgtttgtggtggaaagacagccctgcatgccaacgcaccctcagaggccgctggtcttgaagacaggggtccagttcactgtgaagttgagactgttggtgaaattgcaagagctgaattataatttgaaagtcaaagtcttatttgataaagatgtgaatgagagaaatacagtaaaaggatttaggaagttcaacattttgggcacgcacacaaaagtgatgaacatggaggagtccaccaatggcagtctggcggctgaatttcggcacctgcaattgaaagaacagaaaaatgctggcaccagaacgaatgagggtcctctcatcgttactgaagagcttcactcccttagttttgaaacccaattgtgccagcctggtttggtaattgacctcgagacgacctctctgcccgttgtggtgatctccaacgtcagccagctcccgagcggttgggcctccatcctttggtacaacatgctggtggcggaacccaggaatctgtccttcttcctgactccaccatgtgcacgatgggctcagctttcagaagtgctgagttggcagttttcttctgtcaccaaaagaggtctcaatgtggaccagctgaacatgttgggagagaagcttcttggtcctaacgccagccccgatggtctcattccgtggacgaggttttgtaaggaaaatataaatgataaaaattttcccttctggctttggattgaaagcatcctagaactcattaaaaaacacctgctccctctctggaatgatgggtgcatcatgggcttcatcagcaaggagcgagagcgtgccctgttgaaggaccagcagccggggaccttcctgctgcggttcagtgagagctcccgggaaggggccatcacattcacatgggtggagcggtcccagaacggaggcgaacctgacttccatgcggttgaaccctacacgaagaaagaactttctgctgttactttccctgacatcattcgcaattacaaagtcatggctgctgagaatattcctgagaatcccctgaagtatctgtatccaaatattgacaaagaccatgcctttggaaagtattactccaggccaaaggaagcaccagagccaatggaacttgatggccctaaaggaactggatatatcaagactgagttgatttctgtgtctgaagtgtaa

SEQ ID NO: 7 - DNA, 2253 bp, Homo sapiens
atgtctcagtggtacgaacttcagcagcttgactcaaaattcctggagcaggttcaccagctttatgatgacagttttcccatggaaatcagacagtacctggcacagtggttagaaaagcaagactgggagcacgctgccaatgatgtttcatttgccaccatccgttttcatgacctcctgtcacagctggatgatcaatatagtcgcttttctttggagaataacttcttgctacagcataacataaggaaaagcaagcgtaatcttcaggataattttcaggaagacccaatccagatgtctatgatcatttacagctgtctgaaggaagaaaggaaaattctggaaaacgcccagagatttaatcaggctcagtcggggaatattcagagcacagtgatgttagacaaacagaaagagcttgacagtaaagtcagaaatgtgaaggacaaggttatgtgtatagagcatgaaatcaagagcctggaagatttacaagatgaatatgacttcaaatgcaaaaccttgcagaacagagaacacgagaccaatggtgtggcaaagagtgatcagaaacaagaacagctgttactcaagaagatgtatttaatgcttgacaataagagaaaggaagtagttcacaaaataatagagttgctgaatgtcactgaacttacccagaatgccctgattaatgatgaactagtggagtggaagcggagacagcagagcgcctgtattggggggccgcccaatgcttgcttggatcagctgcagaactggttcactatagttgcggagagtctgcagcaagttcggcagcagcttaaaaagttggaggaattggaacagaaatacacctacgaacatgaccctatcacaaaaaacaaacaagtgttatgggaccgcaccttcagtcttttccagcagctcattcagagctcgtttgtggtggaaagacagccctgcatgccaacgcaccctcagaggccgctggtcttgaagacaggggtccagttcactgtgaagttgagactgttggtgaaattgcaagagctgaattataatttgaaagtcaaagtcttatttgataaagatgtgaatgagagaaatacagtaaaaggatttaggaagttcaacattttgggcacgcacacaaaagtgatgaacatggaggagtccaccaatggcagtctggcggctgaatttcggcacctgcaattgaaagaacagaaaaatgctggcaccagaacgaatgagggtcctctcatcgttactgaagagcttcactcccttagttttgaaacccaattgtgccagcctggtttggtaattgacctcgagacgacctctctgcccgttgtggtgatctccaacgtcagccagctcccgagcggttgggcctccatcctttggtacaacatgctggtggcggaacccaggaatctgtccttcttcctgactccaccatgtgcacgatgggctcagctttcagaagtgctgagttggcagttttcttctgtcaccaaaagaggtctcaatgtggaccagctgaacatgttgggagagaagcttcttggtcctaacgccagccccgatggtctcattccgtggacgaggttttgtaaggaaaatataaatgataaaaattttcccttctggctttggattgaaagcatcctagaactcattaaaaaacacctgctccctctctggaatgatgggtgcatcatgggcttcatcagcaaggagcgagagcgtgccctgttgaaggaccagcagccggggaccttcctgctgcggttcagtgagagctcccgggaaggggccatcacattcacatgggtggagcggtcccagaacggaggcgaacctgacttccatgcggttgaaccctacacgaagaaagaactttctgctgttactttccctgacatcattcgcaattacaaagtcatggctgctgagaatattcctgagaatcccctgaagtatctgtatccaaatattgacaaagaccatgcctttggaaagtattactccaggccaaaggaagcaccagagccaatggaacttgatggccctaaaggaactggatatatcaagactgagttgatttctgtgtctgaagttcacccttctagacttcagaccacagacaacctgctccccatgtctcctgaggagtttgacgaggtgtctcggatagtgggctctgtagaattcgacagtatgatgaacacagtatag

SEQ ID NO: 8 - DNA, 2313 bp, Homo sapiens
atggcccaatggaatcagctacagcagcttgacacacggtacctggagcagctccatcagctctacagtgacagcttcccaatggagctgcggcagtttctggccccttggattgagagtcaagattgggcatatgcggccagcaaagaatcacatgccactttggtgtttcataatctcctgggagagattgaccagcagtatagccgcttcctgcaagagtcgaatgttctctatcagcacaatctacgaagaatcaagcagtttcttcagagcaggtatcttgagaagccaatggagattgcccggattgtggcccggtgcctgtgggaagaatcacgccttctacagactgcagccactgcggcccagcaagggggccaggccaaccaccccacagcagccgtggtgacggagaagcagcagatgctggagcagcaccttcaggatgtccggaagagagtgcaggatctagaacagaaaatgaaagtggtagagaatctccaggatgactttgatttcaactataaaaccctcaagagtcaaggagacatgcaagatctgaatggaaacaaccagtcagtgaccaggcagaagatgcagcagctggaacagatgctcactgcgctggaccagatgcggagaagcatcgtgagtgagctggcggggcttttgtcagcgatggagtacgtgcagaaaactctcacggacgaggagctggctgactggaagaggcggcaacagattgcctgcattggaggcccgcccaacatctgcctagatcggctagaaaactggataacgtcattagcagaatctcaacttcagacccgtcaacaaattaagaaactggaggagttgcagcaaaaagtttcctacaaaggggaccccattgtacagcaccggccgatgctggaggagagaatcgtggagctgtttagaaacttaatgaaaagtgcctttgtggtggagcggcagccctgcatgcccatgcatcctgaccggcccctcgtcatcaagaccggcgtccagttcactactaaagtcaggttgctggtcaaattccctgagttgaattatcagcttaaaattaaagtgtgcattgacaaagactctggggacgttgcagctctcagaggatcccggaaatttaacattctgggcacaaacacaaaagtgatgaacatggaagaatccaacaacggcagcctctctgcagaattcaaacacttgaccctgagggagcagagatgtgggaatgggggccgagccaattgtgatgcttccctgattgtgactgaggagctgcacctgatcacctttgagaccgaggtgtatcaccaaggcctcaagattgacctagagacccactccttgccagttgtggtgatctccaacatctgtcagatgccaaatgcctgggcgtccatcctgtggtacaacatgctgaccaacaatcccaagaatgtaaacttttttaccaagcccccaattggaacctgggatcaagtggccgaggtcctgagctggcagttctcctccaccaccaagcgaggactgagcatcgagcagctgactacactggcagagaaactcttgggacctggtgtgaattattcagggtgtcagatcacatgggctaaattttgcaaagaaaacatggctggcaagggcttctccttctgggtctggctggacaatatcattgaccttgtgaaaaagtacatcctggccctttggaacgaagggtacatcatgggctttatcagtaaggagcgggagcgggccatcttgagcactaagcctccaggcaccttcctgctaagattcagtgaaagcagcaaagaaggaggcgtcactttcacttgggtggagaaggacatcagcggtaagacccagatccagtccgtggaaccatacacaaagcagcagctgaacaacatgtcatttgctgaaatcatcatgggctataagatcatggatgctaccaatatcctggtgtctccactggtctatctctatcctgacattcccaaggaggaggcattcggaaagtattgtcggccagagagccaggagcatcctgaagctgacccaggtagcgctgccccatacctgaagaccaagtttatctgtgtgacaccaacgacctgcagcaataccattgacctgccgatgtccccccgcactttagattcattgatgcagtttggaaataatggtgaaggtgctgaaccctcagcaggagggcagtttgagtccctcacctttgacatggagttgacctcggagtgcgctacctcccccatgtga

SEQ ID NO: 9 - DNA, 2310 bp, Homo sapiens
atggcccaatggaatcagctacagcagcttgacacacggtacctggagcagctccatcagctctacagtgacagcttcccaatggagctgcggcagtttctggccccttggattgagagtcaagattgggcatatgcggccagcaaagaatcacatgccactttggtgtttcataatctcctgggagagattgaccagcagtatagccgcttcctgcaagagtcgaatgttctctatcagcacaatctacgaagaatcaagcagtttcttcagagcaggtatcttgagaagccaatggagattgcccggattgtggcccggtgcctgtgggaagaatcacgccttctacagactgcagccactgcggcccagcaagggggccaggccaaccaccccacagcagccgtggtgacggagaagcagcagatgctggagcagcaccttcaggatgtccggaagagagtgcaggatctagaacagaaaatgaaagtggtagagaatctccaggatgactttgatttcaactataaaaccctcaagagtcaaggagacatgcaagatctgaatggaaacaaccagtcagtgaccaggcagaagatgcagcagctggaacagatgctcactgcgctggaccagatgcggagaagcatcgtgagtgagctggcggggcttttgtcagcgatggagtacgtgcagaaaactctcacggacgaggagctggctgactggaagaggcggcaacagattgcctgcattggaggcccgcccaacatctgcctagatcggctagaaaactggataacgtcattagcagaatctcaacttcagacccgtcaacaaattaagaaactggaggagttgcagcaaaaagtttcctacaaaggggaccccattgtacagcaccggccgatgctggaggagagaatcgtggagctgtttagaaacttaatgaaaagtgcctttgtggtggagcggcagccctgcatgcccatgcatcctgaccggcccctcgtcatcaagaccggcgtccagttcactactaaagtcaggttgctggtcaaattccctgagttgaattatcagcttaaaattaaagtgtgcattgacaaagactctggggacgttgcagctctcagaggatcccggaaatttaacattctgggcacaaacacaaaagtgatgaacatggaagaatccaacaacggcagcctctctgcagaattcaaacacttgaccctgagggagcagagatgtgggaatgggggccgagccaattgtgatgcttccctgattgtgactgaggagctgcacctgatcacctttgagaccgaggtgtatcaccaaggcctcaagattgacctagagacccactccttgccagttgtggtgatctccaacatctgtcagatgccaaatgcctgggcgtccatcctgtggtacaacatgctgaccaacaatcccaagaatgtaaacttttttaccaagcccccaattggaacctgggatcaagtggccgaggtcctgagctggcagttctcctccaccaccaagcgaggactgagcatcgagcagctgactacactggcagagaaactcttgggacctggtgtgaattattcagggtgtcagatcacatgggctaaattttgcaaagaaaacatggctggcaagggcttctccttctgggtctggctggacaatatcattgaccttgtgaaaaagtacatcctggccctttggaacgaagggtacatcatgggctttatcagtaaggagcgggagcgggccatcttgagcactaagcctccaggcaccttcctgctaagattcagtgaaagcagcaaagaaggaggcgtcactttcacttgggtggagaaggacatcagcggtaagacccagatccagtccgtggaaccatacacaaagcagcagctgaacaacatgtcatttgctgaaatcatcatgggctataagatcatggatgctaccaatatcctggtgtctccactggtctatctctatcctgacattcccaaggaggaggcattcggaaagtattgtcggccagagagccaggagcatcctgaagctgacccaggcgctgccccatacctgaagaccaagtttatctgtgtgacaccaacgacctgcagcaataccattgacctgccgatgtccccccgcactttagattcattgatgcagtttggaaataatggtgaaggtgctgaaccctcagcaggagggcagtttgagtccctcacctttgacatggagttgacctcggagtgcgctacctcccccatgtga

SEQ ID NO: 10 - DNA, 2544 bp, Homo sapiens
atgtctctgtggggtctggtctccaagatgcccccagaaaaagtgcagcggctctatgtcgactttccccaacacctgcggcatcttctgggtgactggctggagagccagccctgggagttcctggtcggctccgacgccttctgctgcaacttggctagtgccctactttcagacactgtccagcaccttcaggcctcggtgggagagcagggggaggggagcaccatcttgcaacacatcagcacccttgagagcatatatcagagggaccccctgaagctggtggccactttcagacaaatacttcaaggagagaaaaaagctgttatggaacagttccgccacttgccaatgcctttccactggaagcaggaagaactcaagtttaagacaggcttgcggaggctgcagcaccgagtaggggagatccaccttctccgagaagccctgcagaagggggctgaggctggccaagtgtctctgcacagcttgatagaaactcctgctaatgggactgggccaagtgaggccctggccatgctactgcaggagaccactggagagctagaggcagccaaagccctagtgctgaagaggatccagatttggaaacggcagcagcagctggcagggaatggcgcaccgtttgaggagagcctggccccactccaggagaggtgtgaaagcctggtggacatttattcccagctacagcaggaggtaggggcggctggtggggagcttgagcccaagacccgggcatcgctgactggccggctggatgaagtcctgagaaccctcgtcaccagttgcttcctggtggagaagcagcccccccaggtactgaagactcagaccaagttccaggctggagttcgattcctgttgggcttgaggttcctgggggccccagccaagcctccgctggtcagggccgacatggtgacagagaagcaggcgcgggagctgagtgtgcctcagggtcctggggctggagcagaaagcactggagaaatcatcaacaacactgtgcccttggagaacagcattcctgggaactgctgctctgccctgttcaagaacctgcttctcaagaagatcaagcggtgtgagcggaagggcactgagtctgtcacagaggagaagtgcgctgtgctcttctctgccagcttcacacttggccccggcaaactccccatccagctccaggccctgtctctgcccctggtggtcatcgtccatggcaaccaagacaacaatgccaaagccactatcctgtgggacaatgccttctctgagatggaccgcgtgccctttgtggtggctgagcgggtgccctgggagaagatgtgtgaaactctgaacctgaagttcatggctgaggtggggaccaaccgggggctgctcccagagcacttcctcttcctggcccagaagatcttcaatgacaacagcctcagtatggaggccttccagcaccgttctgtgtcctggtcgcagttcaacaaggagatcctgctgggccgtggcttcaccttttggcagtggtttgatggtgtcctggacctcaccaaacgctgtctccggagctactggtctgaccggctgatcattggcttcatcagcaaacagtacgttactagccttcttctcaatgagcccgacggaacctttctcctccgcttcagcgactcagagattgggggcatcaccattgcccatgtcatccggggccaggatggctctccacagatagagaacatccagccattctctgccaaagacctgtccattcgctcactgggggaccgaatccgggatcttgctcagctcaaaaatctctatcccaagaagcccaaggatgaggctttccggagccactacaagcctgaacagatgggtaaggatggcaggggttatgtcccagctaccatcaagatgaccgtggaaagggaccaaccacttcctaccccagagctccagatgcctaccatggtgccttcttatgaccttggaatggcccctgattcctccatgagcatgcagcttggcccagatatggtgccccaggtgtacccaccacactctcactccatccccccgtatcaaggcctctccccagaagaatcagtcaacgtgttgtcagccttccaggagcctcacctgcagatgccccccagcctgggccagatgagcctgccctttgaccagcctcacccccagggcctgctgccgtgccagcctcaggagcatgctgtgtccagccctgaccccctgctctgctcagatgtgaccatggtggaagacagctgcctgagccagccagtgacagcgtttcctcagggcacttggattggtgaagacatattccctcctctgctgcctcccactgaacaggacctcactaagcttctcctggaggggcaaggggagtcggggggagggtccttgggggcacagcccctcctgcagccctcccactatgggcaatctgggatctcaatgtcccacatggacctaagggccaaccccagttggtga

SEQ ID NO: 11 - DNA, 447 bp, Homo sapiens
atggtagatggaaaaccggtgaatctgggcttatgggatacagctggacaagaagattatgacagattacgccccctatcctatccgcaaacagatgtgttcttaatttgcttttcccttgtgagtcctgcatcatttgaaaatgtccgtgcaaagtggtatcctgaggtgcggcaccactgtcccaacactcccatcatcctagtgggaactaaacttgatcttagggatgataaagacacgatcgagaaactgaaggagaagaagctgactcccatcacctatccgcagggtctagccatggctaaggagattggtgctgtaaaatacctggagtgctcggcgctcacacagcgaggcctcaagacagtgtttgacgaagcgatccgagcagtcctctgcccgcctcccgtgaagaagaggaagagaaaatgcctgctgttgtaa

SEQ ID NO: 12 - DNA, 579 bp, Homo sapiens
atgcaggccatcaagtgtgtggtggtgggagatggggccgtgggcaagacctgccttctcatcagctacaccaccaacgcctttcccggagagtacatccccaccgtgtttgacaactattcagccaatgtgatggtggacagcaagccagtgaacctggggctgtgggacactgctgggcaggaggactacgaccgtctccggccgctctcctatccacagacggacgtcttcctcatctgcttctccctcgtcagcccagcctcttatgagaacgtccgcgccaagtggttcccagaagtgcggcaccactgccccagcacacccatcatcctggtgggcaccaagctggacctgcgggacgacaaggacaccatcgagaaactgaaggagaagaagctggctcccatcacctacccgcagggcctggcactggccaaggagattgactcggtgaaatacctggagtgctcagctctcacccagagaggcctgaaaaccgtgttcgacgaggccatccgggccgtgctgtgccctcagcccacgcggcagcagaagcgcgcctgcagcctcctctag

SEQ ID NO: 13 - DNA, 1695 bp, Homo sapiens
atgggaaactgggtggttaaccactggttttcagttttgtttctggttgtttggttagggctgaatgttttcctgtttgtggatgccttcctgaaatatgagaaggccgacaaatactactacacaagaaaaatccttgggtcaacattggcctgtgcccgagcgtctgctctctgcttgaattttaacagcacgctgatcctgcttcctgtgtgtcgcaatctgctgtccttcctgaggggcacctgctcattttgcagccgcacactgagaaagcaattggatcacaacctcaccttccacaagctggtggcctatatgatctgcctacatacagctattcacatcattgcacacctgtttaactttgactgctatagcagaagccgacaggccacagatggctcccttgcctccattctctccagcctatctcatgatgagaaaaaggggggttcttggctaaatcccatccagtcccgaaacacgacagtggagtatgtgacattcaccagcattgctggtctcactggagtgatcatgacaatagccttgattctcatggtaacttcagctactgagttcatccggaggagttattttgaagtcttctggtatactcaccacctttttatcttctatatccttggcttagggattcacggcattggtggaattgtccggggtcaaacagaggagagcatgaatgagagtcatcctcgcaagtgtgcagagtcttttgagatgtgggatgatcgtgactcccactgtaggcgccctaagtttgaagggcatccccctgagtcttggaagtggatccttgcaccggtcattctttatatctgtgaaaggatcctccggttttaccgctcccagcagaaggttgtgattaccaaggttgttatgcacccatccaaagttttggaattgcagatgaacaagcgtggcttcagcatggaagtggggcagtatatctttgttaattgcccctcaatctctctcctggaatggcatccttttactttgacctctgctccagaggaagatttcttctccattcatatccgagcagcaggggactggacagaaaatctcataagggctttcgaacaacaatattcaccaattcccaggattgaagtggatggtccctttggcacagccagtgaggatgttttccagtatgaagtggctgtgctggttggagcaggaattggggtcaccccctttgcttctatcttgaaatccatctggtacaaattccagtgtgcagaccacaacctcaaaacaaaaaagatctatttctactggatctgcagggagacaggtgccttttcctggttcaacaacctgttgacttccctggaacaggagatggaggaattaggcaaagtgggttttctaaactaccgtctcttcctcaccggatgggacagcaatattgttggtcatgcagcattaaactttgacaaggccactgacatcgtgacaggtctgaaacagaaaacctcctttgggagaccaatgtgggacaatgagttttctacaatagctacctcccaccccaagtctgtagtgggagttttcttatgtggccctcggactttggcaaagagcctgcgcaaatgctgtcaccgatattccagtctggatcctagaaaggttcaattctacttcaacaaagaaaatttttga

SEQ ID NO: 14 - DNA, 1548 bp, Homo sapiens
atgggaaactgggtggttaaccactggttttcagttttgtttctggttgtttggttagggctgaatgttttcctgtttgtggatgccttcctgaaatatgagaaggccgacaaatactactacacaagaaaaatccttgggtcaacattggcctgtgcccgagcgtctgctctctgcttgaattttaacagcacgctgatcctgcttcctgtgtgtcgcaatctgctgtccttcctgaggggcacctgctcattttgcagccgcacactgagaaagcaattggatcacaacctcaccttccacaagctggtggcctatatgatctgcctacatacagctattcacatcattgcacacctgtttaactttgactgctatagcagaagccgacaggccacagatggctcccttgcctccattctctccagcctatctcatgatgagaaaaaggggggttcttggctaaatcccatccagtcccgaaacacgacagtggagtatgtgacattcaccagcattgctggtctcactggagtgatcatgacaatagccttgattctcatggtaacttcagctactgagttcatccggaggagttattttgaagtcttctggtatactcaccacctttttatcttctatatccttggcttagggattcacggcattggtggaattgtccggggtcaaacagaggagagcatgaatgagagtcatcctcgcaagtgtgcagagtcttttgagatgtgggatgatcgtgactcccactgtaggcgccctaagtttgaagggcatccccctgagtcttggaagtggatccttgcaccggtcattctttatatctgtgaaaggatcctccggttttaccgctcccagcagaaggttgtgattaccaaggttgttatgcacccatccaaagttttggaattgcagatgaacaagcgtggcttcagcatggaagtggggcagtatatctttgttaattgcccctcaatctctctcctggaatggcatccttttactttgacctctgctccagaggaagatttcttctccattcatatccgagcagcaggggactggacagaaaatctcataagggctttcgaacaacaatattcaccaattcccaggattgaagtggatggtccctttggcacagccagtgaggatgttttccagtatgaagtggctgtgctggttggagcaggaattggggtcaccccctttgcttctatcttgaaatccatctggtacaaattccagtgtgcagaccacaacctcaaaacaaaaaaggttggtcatgcagcattaaactttgacaaggccactgacatcgtgacaggtctgaaacagaaaacctcctttgggagaccaatgtgggacaatgagttttctacaatagctacctcccaccccaagtctgtagtgggagttttcttatgtggccctcggactttggcaaagagcctgcgcaaatgctgtcaccgatattccagtctggatcctagaaaggttcaattctacttcaacaaagaaaatttttga

SEQ ID NO: 15 - DNA, 1713 bp, Homo sapiens
atggggaactgggctgtgaatgaggggctctccatttttgtcattctggtttggctggggttgaacgtcttcctctttgtctggtattaccgggtttatgatattccacctaagttcttttacacaagaaaacttcttgggtcagcactggcactggccagggcccctgcagcctgcctgaatttcaactgcatgctgattctcttgccagtctgtcgaaatctgctgtccttcctcaggggttccagtgcgtgctgctcaacaagagttcgaagacaactggacaggaatctcacctttcataaaatggtggcatggatgattgcacttcactctgcgattcacaccattgcacatctatttaatgtggaatggtgtgtgaatgcccgagtcaataattctgatccttattcagtagcactctctgaacttggagacaggcaaaatgaaagttatctcaattttgctcgaaagagaataaagaaccctgaaggaggcctgtacctggctgtgaccctgttggcaggcatcactggagttgtcatcacgctgtgcctcatattaattatcacttcctccaccaaaaccatccggaggtcttactttgaagtcttttggtacacacatcatctctttgtgatcttcttcattggccttgccatccatggagctgaacgaattgtacgtgggcagaccgcagagagtttggctgtgcataatataacagtttgtgaacaaaaaatctcagaatggggaaaaataaaggaatgcccaatccctcagtttgctggaaaccctcctatgacttggaaatggatagtgggtcccatgtttctgtatctctgtgagaggttggtgcggttttggcgatctcaacagaaggtggtcatcaccaaggtggtcactcaccctttcaaaaccatcgagctacagatgaagaagaaggggttcaaaatggaagtgggacaatacatttttgtcaagtgcccaaaggtgtccaagctggagtggcacccttttacactgacatccgcccctgaggaagacttctttagtatccatatccgcatcgttggggactggacagaggggctgttcaatgcttgtggctgtgataagcaggagtttcaagatgcgtggaaactacctaagatagcggttgatgggccctttggcactgccagtgaagatgtgttcagctatgaggtggtgatgttagtgggagcagggattggggtcacacccttcgcatccattctcaagtcagtctggtacaaatattgcaataacgccaccaatctgaagctcaaaaagatctacttctactggctgtgccgggacacacatgcctttgagtggtttgcagatctgctgcaactgctggagagccagatgcaggaaaggaacaatgccggcttcctcagctacaacatctacctcactggctgggatgagtctcaggccaatcactttgctgtgcaccatgatgaggagaaagatgtgatcacaggcctgaaacaaaagactttgtatggacggcccaactgggataatgaattcaagacaattgcaagtcaacaccctaataccagaataggagttttcctctgtggacctgaagccttggctgaaaccctgagtaaacaaagcatctccaactctgagtctggccctcggggagtgcatttcattttcaacaaggaaaacttctaa

SEQ ID NO: 16 - DNA, 1707 bp, Homo sapiens
atgatggggtgctggattttgaatgagggtctctccaccatattagtactctcatggctgggaataaatttttatctgtttattgacacgttctactggtatgaagaggaggagtctttccattacacacgagttattttgggttcaacactggcttgggcacgagcatccgcactgtgcctgaattttaactgcatgctaattctaatacctgtcagtcgaaaccttatttcattcataagaggaacaagtatttgctgcagaggaccgtggaggaggcaattagacaaaaacctcagatttcacaaactggtcgcctatgggatagctgttaatgcaaccatccacatcgtggcgcatttcttcaacctggaacgctaccactggagccagtccgaggaggcccagggacttctggccgcactttccaagctgggcaacacccctaacgagagctacctcaaccctgtccggaccttccccacaaacacaaccactgaattgctaaggacaatagcaggcgtcaccggtctggtgatctctctggctttagtcttgatcatgacctcgtcaactgagttcatcagacaggcctcctatgagttgttctggtacacacaccatgttttcatcgtcttctttctcagcctggccatccatgggacgggtcggattgttcgaggccaaacccaagacagtctctctctgcacaacatcaccttctgtagagaccgctatgcagaatggcagacagtggcccaatgccccgtgcctcaattttctggcaaggaaccctcggcttggaaatggattttaggccctgtggtcttgtatgcatgtgaaagaataattaggttctggcgatttcaacaagaagttgtcattaccaaggtggtaagccacccctctggagtcctggaacttcacatgaaaaagcgtggctttaaaatggcgccagggcagtacatcttggtgcagtgcccagccatatcttcgctggagtggcaccccttcacccttacctctgccccccaggaagactttttcagcgtgcacatccgggcagcaggagactggacagcagcgctactggaggcctttggggcagagggacaggccctccaggagccctggagcctgccaaggctggcagtggacgggccctttggaactgccctgacagatgtatttcactacccagtgtgtgtgtgcgttgccgcggggatcggagtcactcccttcgctgctcttctgaaatctatatggtacaaatgcagtgaggcacagaccccactgaagctgagcaaggtgtatttctactggatttgccgggatgcaagagcttttgagtggtttgctgatctcttactctccctggaaacacggatgagtgagcaggggaaaactcactttctgagttatcatatatttcttaccggctgggatgaaaatcaggctcttcacatagctttacactgggacgaaaatactgacgtgattacaggcttaaagcagaagaccttctatgggaggcccaactggaacaatgagttcaagcagattgcctacaatcaccccagcagcagtattggcgtgttcttctgtggacctaaagctctctcgaggacacttcaaaagatgtgccacttgtattcatcagctgaccccagaggtgttcatttctattacaacaaggagagcttctag

SEQ ID NO: 17 - DNA, 1737 bp, Homo sapiens
atggctgtgtcctggaggagctggctcgccaacgaaggggttaaacacctctgcctgttcatctggctctccatgaatgtcctgcttttctggaaaaccttcttgctgtataaccaagggccagagtatcactacctccaccagatgttggggctaggattgtgtctaagcagagcctcagcatctgttcttaacctcaactgcagccttatccttttacccatgtgccgaacactcttggcttacctccgaggatcacagaaggttccaagcaggagaaccaggagattgttggataaaagcagaacattccatattacctgtggtgttactatctgtattttctcaggcgtgcatgtggctgcccatctggtgaatgccctcaacttctcagtgaattacagtgaagactttgttgaactgaatgcagcaagataccgagatgaggatcctagaaaacttctcttcacaactgttcctggcctgacaggggtctgcatggtggtggtgctattcctcatgatcacagcctctacatatgcaataagagtttctaactatgatatcttctggtatactcataacctcttctttgtcttctacatgctgctgacgttgcatgtttcaggagggctgctgaagtatcaaactaatttagatacccaccctcccggctgcatcagtcttaaccgaaccagctctcagaatatttccttaccagagtatttctcagaacattttcatgaacctttccctgaaggattttcaaaaccggcagagtttacccagcacaaatttgtgaagatttgtatggaagagcccagattccaagctaattttccacagacttggctttggatttctggacctttgtgcctgtactgtgccgaaagactttacaggtatatccggagcaataagccagtcaccatcatttcggtcataagtcatccctcagatgtcatggaaatccgaatggtcaaagaaaattttaaagcaagacctggtcagtatattactctacattgtcccagtgtatctgcattagaaaatcatccatttaccctcacaatgtgtccaactgaaaccaaagcaacatttggggttcatcttaaaatagtaggagactggacagaacgatttcgagatttactactgcctccatctagtcaagactccgaaattctgcccttcattcaatctagaaattatcccaagctgtatattgatggtccttttggaagtccatttgaggaatcactgaactatgaggtcagcctctgcgtggctggaggcattggagtaactccatttgcatcaatactcaacaccctgttggatgactggaaaccatacaagcttagaagactatactttatttgggtatgcagagatatccagtccttccgttggtttgcagatttactctgtatgttgcataacaagttttggcaagagaacagacctgactatgtcaacatccagctgtacctcagtcaaacagatgggatacagaagataattggagaaaaatatcatgcactgaattcaagactgtttataggacgtcctcggtggaaacttttgtttgatgaaatagcaaaatataacagaggaaaaacagttggtgttttctgttgtggacccaattcactatccaagactcttcataaactgagtaaccagaacaactcatatgggacaagatttgaatacaataaagagtctttcagctga

SEQ ID NO: 18 - DNA, 2244 bp, Homo sapiens
atgagtgccgaggaggatgccaggtggctccggtgggtgactcagcagtttaagaccattgcaggagaagatggggagatcagcctgcaagaattcaaagcagctctgcatgtgaaagagtccttctttgcagagcgattctttgccctatttgactccgatagaagtggcaccatcaccctccaggagctgcaggaggcactgaccctgctcatccatggcagccccatggacaaactcaaattcctcttccaggtgtatgacatcgatgtgtgtgcacggcagggggcgtctgcaggtacagagtggggtgctggggcaggcccgcactgggcttcatccccactcgggacaggcagtggctccattgacccggatgagctgcgcactgtgctgcagtcgtgtctgcgcgagagcgccatctcgctgcctgacgagaagctggaccagctgacgctggcgctcttcgaatcggccgacgcggacggcaacggggccatcaccttcgaggagctccgggacgagctgcagcgcttccccggagtcatggagaacctgaccatcagcgctgcccactggctgacggcccccgccccccgcccacgcccgcgccggccgcgccagctgacccgcgcctactggcacaaccaccgcagccagctgttctgcctggccacctatgcaggcctccacgtgctgctcttcgggctggcggccagcgcgcaccgggacctcggcgccagcgtcatggtggccaagggctgtggccagtgcctcaacttcgactgcagcttcatcgcggtgctgatgctcagacgctgcctcacctggctgcgggccacgtggctggctcaagtcctaccactggaccagaacatccagttccaccagcttatgggctacgtggtagtggggctgtccctcgtgcacactgtggctcacactgtgaactttgtactccaggctcaggcggaggccagccctttccagttctgggagctgctgctcaccacgaggcctggcattggctgggtacacggttcggcctccccgacaggtgtcgctctgctgctgctgctcctcctcatgttcatctgctccagttcctgcatccgcaggagtggccactttgaggtgttctattggactcacctgtcctacctcctcgtgtggcttctgctcatctttcatgggcccaacttctggaagtggctgctggtgcctggaatcttgtttttcctggagaaggccatcggactggcagtgtcccgcatggcagccgtgtgcatcatggaagtcaacctcctcccctccaaggtcactcatctcctcatcaagcggccccctttttttcactatagacctggtgactacttgtatctgaacatccccaccattgctcgctatgagtggcaccccttcaccatcagcagtgctcctgagcagaaagacactatctggctgcacattcggtcccaaggccagtggacaaacaggctgtatgagtccttcaaggcatcagacccactgggccgtggttctaagaggctgtcgaggagtgtgacaatgagaaagagtcaaaggtcgtccaagggctctgagatacttttggagaaacacaaattctgtaacatcaagtgctacatcgatgggccttatgggacccccacccgcaggatctttgcctctgagcatgccgtgctcatcggggcaggcatcggcatcaccccctttgcttccattctgcagagtatcatgtacaggcaccagaaaagaaagcatacttgccccagctgccagcactcctggatcgaaggtgtccaagacaacatgaagctccataaggtggactttatctggatcaacagagaccagcggtctttcgagtggtttgtgagcctgctgactaaactggagatggaccaggccgaggaggctcaatacggccgcttcctggagctgcatatgtacatgacatctgcactgggcaagaatgacatgaaggccattggcctgcagatggcccttgacctcctggccaacaaggagaagaaagactccatcacggggctgcagacgcgcacccagcctgggcggcctgactggagcaaggtgttccagaaagtggctgctgagaagaagggcaaggtgcaggtcttcttctgtggctccccagctctggccaaggtgctgaagggccattgtgagaagttcggcttcagatttttccaagagaatttctag

SEQ ID NO: 19 - DNA, 4656 bp, Homo sapiens
atgggcttctgcctggctctagcatggacacttctggttggggcatggacccctctgggagctcagaaccccatttcgtgggaggtgcagcgatttgatgggtggtacaacaacctcatggagcacagatggggcagcaaaggctcccggctgcagcgcctggtcccagccagctatgcagatggcgtgtaccagcccttgggagaaccccacctgcccaacccccgagaccttagcaacaccatctcaaggggccctgcagggctggcctccctgagaaaccgcacagtgttgggggtcttctttggctatcacgtgctttcagacctggtgagcgtggaaactcccggctgccccgccgagttcctcaacattcgcatcccgcccggagaccccatgttcgaccccgaccagcgcggggacgtggtgctgcccttccagagaagccgctgggaccccgagaccggacggagtcccagcaatccccgggacccggccaaccaggtgacgggctggctggacggcagcgccatctatggttcctcgcattcctggagcgacgcgctgcggagcttctccaggggacagctggcgtcggggcccgaccccgcttttccccgagactcgcagaaccccctgctcatgtgggcggcgcccgaccccgccaccgggcagaacgggccccgggggctgtacgccttcggggcagagagagggaaccgggaacccttcctgcaggcgctgggcctgctctggttccgctaccacaacctgtgggcgcagaggctggcccgccagcacccagactgggaggacgaggagctgttccagcacgcacgcaagagggtcatcgccacctaccagaacatcgctgtgtatgagtggctgcccagcttcctgcagaaaacactcccggagtatacaggataccggccatttctggaccccagcatctcctcagagttcgtggcggcctctgagcagttcctgtccaccatggtgccccctggcgtctacatgagaaatgccagctgccacttccagggggtcatcaatcggaactcaagtgtctccagagctctccgggtctgcaacagctactggagccgtgagcacccaagcctacaaagtgctgaagatgtggatgcactgctgctgggcatggcctcccagatcgcagagcgagaggaccatgtgttggttgaagatgtgcgggatttctggcctgggccactgaagttttcccgcacagaccacctggccagctgcctgcagcggggccgggatctgggcctgccctcttacaccaaggccagggcagcactgggcttgtctcccattacccgctggcaggacatcaaccctgcactctcccggagcaatgacactgtactggaggccacagctgccctgtacaaccaggacttatcctggctagagctgctccctgggggactcctggagagccaccgggaccctggacctctgttcagcaccatcgtccttgaacaatttgtgcggctacgggatggtgaccgctactggtttgagaacaccaggaatgggctgttctccaagaaggagattgaagaaatccgaaataccaccctgcaggacgtgctggtcgctgttatcaacattgaccccagtgctctgcagcccaatgtctttgtctggcataaaggagacccctgtccgcagccgagacagctcagcactgaaggcctgccagcgtgtgctccctctgttgttcgtgactattttgagggcagtggatttggcttcggggtcaccatcgggaccctctgttgcttccctttggtgagcctgctcagtgcctggattgttgcccggctccggatgagaaatttcaagaggctccagggccaggaccgccagagcatcgtgtctgagaagctcgtgggaggcatggaagctttggaatggcaaggccacaaggagccctgccggcccgtgcttgtgtacctgcagcccgggcagatccgtgtggtagatggcaggctcaccgtgctccgcaccatccagctgcagcctccacagaaggtcaacttcgtcctgtccagcaaccgtggacgccgcactctgctgctcaagatccccaaggagtatgacctggtgctgctgtttaacttggaggaagagcggcaggcgctggtggaaaatctccggggagctctgaaggagagcgggttgagcatccaggagtgggagctgcgggagcaggagctgatgagagcagctgtgacacgggagcagcggaggcacctcctggagacctttttcaggcaccttttctcccaggtgctggacatcaaccaggccgacgcagggaccctgcccctggactcctcccagaaggtgcgggaggccctgacctgtgagctgagcagggccgagtttgccgagtccctgggcctcaagccccaggacatgtttgtggagtccatgttctctctggctgacaaggatggcaatggctacctgtccttccgagagttcctggacatcctggtggtcttcatgaaaggctctcctgaggaaaagtctcgccttatgttccgcatgtacgactttgatgggaatggcctcatttccaaggatgagttcatcaggatgctgagatccttcatcgagatctccaacaactgcctgtccaaggcccagctggctgaggtggtggagtccatgttccgggagtcgggattccaggacaaggaggaactgacatgggaagattttcacttcatgctgcgggaccacaatagcgagctccgcttcacgcagctctgtgtcaaaggggtggaggtgcctgaagtcatcaaggacctctgccggcgagcctcctacatcagccaggatatgatctgtccctctcccagagtgagtgcccgctgttcccgcagcgacattgagactgagttgacacctcagagactgcagtgccccatggacacagaccctccccaggagattcggcggaggtttggcaagaaggtaacgtcattccagcccttgctgttcactgaggcgcaccgagagaagttccaacgcagctgtctccaccagacggtgcaacagttcaagcgcttcattgagaactaccggcgccacatcggctgcgtggccgtgttctacgccatcgctggggggcttttcctggagagggcctactactacgcctttgccgcacatcacacgggcatcacagacaccacccgcgtgggaatcatcctgtcgcggggcacagcagccagcatctctttcatgttctcctacatcttgctcaccatgtgccgcaacctcatcaccttcctgcgagaaaccttcctcaaccgctacgtgcccttcgacgccgccgtggacttccatcgcctcattgcctccaccgccatcgtcctcacagtcttacacagtgtgggccatgtggtgaatgtgtacctgttctccatcagccccctcagcgtcctctcttgcctctttcctggcctcttccatgatgatgggtctgagctcccccagaagtattactggtggttcttccagaccgtaccaggcctcacgggggttgtgctgctcctgatcctggccatcatgtatgtctttgcctcccaccacttccgccgccgcagtttccggggcttctggctgacccaccacctctacatcctgctctatgtcctgctcatcatccatggtagctttgccctgatccagctgccccgtttccacatcttcttcctggtcccagcaatcatctatgggggcgacaagctggtgagcctgagccggaagaaggtggagatcagcgtggtgaaggcggagctgctgccctcaggagtgacccacctgcggttccagcggccccagggctttgagtacaagtcagggcagtgggtgcggatcgcttgcctggctctggggaccaccgagtaccaccccttcacactgacctctgcgccccatgaggacacgcttagcctgcacatccgggcagcagggccctggaccactcgcctcagggagatctactcagccccgacgggtgacagatgtgccagatacccaaagctgtaccttgatggaccatttggagagggccaccaggagtggcataagtttgaggtgtcagtgttagtgggagggggcattggggtcaccccttttgcctccatcctcaaagacctggtcttcaagtcatccgtcagctgccaagtgttctgtaagaagatctacttcatctgggtgacgcggacccagcgtcagtttgagtggctggctgacatcatccgagaggtggaggagaatgaccaccaggacctggtgtctgtgcacatctacatcacccagctggctgagaagttcgacctcaggaccactatgctgtacatctgtgagcggcacttccagaaggttctgaaccggagtctattcacaggcctgcgctccatcacccactttggccgtcccccctttgagcccttcttcaactccctgcaggaggtccacccccaggtccggaagatcggggtgtttagctgtggcccccctggcatgaccaagaatgtggaaaaggcctgtcagctcatcaacaggcaggaccggactcacttctcccaccattatgagaacttctag

SEQ ID NO: 20 - DNA, 4656 bp, Homo sapiens; identical to SEQ ID NO: 19

SEQ ID NO: 21 - DNA, 4647 bp, Homo sapiens
atgctccgtgcaagaccagaggcactgatgctcctgggagctcttctgactggatccctgggtccatcgggcaatcaggacgcactctcactgccctgggaagtgcagcgctatgacggctggtttaacaacctgaggcaccacgagcgtggtgctgttggctgccggttgcagcgccgcgtaccagccaattacgccgacggtgtgtatcaggctctggaggagccgcagctgcccaacccgcgccggctcagcaacgcagccacgcggggcatagccggcctgccgtcgctccacaaccgcaccgtactgggggtcttctttggctaccatgttctttccgacgtggtgagcgtggaaacgcccggttgccccgccgagttcctcaacatccgcatcccacctggagaccccgtgttcgaccccgaccagcgcggggacgtggtgctgcccttccagaggagccgctgggaccccgagaccggacggagtcccagcaacccccgggacctggccaaccaggtgacgggctggctggacggcagcgccatctatggctcctcgcactcctggagcgacgcgctgcggagcttctcggggggacagctggcgtcggggcccgaccccgctttcccccgagactcgcagaaccccctgctcatgtgggcggcgcccgaccccgccaccgggcagaacgggccccgggggctgtacgccttcggggcagagagagggaaccgggaacccttcctgcaggcgctgggcctgctctggttccgctaccacaacctgtgggcgcagaggctggcccgccagcacccagactgggaggacgaggagctgttccagcacgcacgcaagagggtcatcgccacctaccagaacatcgctgtgtatgagtggctgcccagcttcctgcagaaaacactcccggagtatacaggataccgtcctttcctagaccccagcatctccccggaatttgtggtggcctctgagcagttcttctctaccatggtgccccctggtgtctacatgagaaatgccagctgtcatttccggaaggtcctgaacaagggttttcaaagctcccaagctctcagggtctgcaacaactactggattcgggagaaccccaatctgaacagtacccaggaggtgaatgagctgctgctgggaatggcctcccagatttcggagttggaggacaacatagtggttgaagatctgagggattactggcctggccctggcaaattctcccgtacagactatgtggccagcagcatccaacgtggccgagatatggggctgcccagctatagccaggccctgctggcctttgggctggacatcccaaggaactggagtgatctcaaccctaatgtggacccccaggtgctggaggccacagctgccctgtacaaccaggacctatcccagctagagctgctccttggggggctcctggagagccatggggaccctggacccctgttcagtgccattgtcctcgaccagtttgtacggctgcgggatggtgaccgctactggtttgagaacaccaggaatgggctgttctccaagaaggagattgaagacatccgaaataccaccctgcgggacgtgctggtcgctgttatcaacattgaccccagtgccctgcagcccaatgtctttgtctggcataaaggtgcaccctgccctcaacctaagcagctcacaactgacggcctgccccagtgtgcacccctgactgtgcttgacttctttgaaggcagcagccctggttttgccatcaccatcattgctctctgctgccttcccttagtgagtctgcttctctctggagtggtggcctatttccggggccgagaacacaagaagctacaaaagaaactcaaagagagcgtgaagaaggaagcagccaaagatggagtgccagcgatggagtggccaggccccaaggagaggagcagtcccatcatcatccagctgctgtcagacaggtgtctgcaggtcctgaacaggcatctcactgtgctccgtgtggtccagctgcagcctctgcagcaggtcaacctcatcctgtccaacaaccgaggatgccgcaccctgctgctcaagatccctaaggagtatgacctggtgctgctgtttagttctgaagaggaacggggcgcctttgtgcagcagctatgggacttctgcgtgcgctgggctctgggcctccatgtggctgagatgagcgagaaggagctatttaggaaggctgtgacaaagcagcagcgggaacgcatcctggagatcttcttcagacacctttttgctcaggtgctggacatcaaccaggccgacgcagggaccctgcccctggactcctcccagaaggtgcgggaggccctgacctgcgagctgagcagggccgagtttgccgagtccctgggcctcaagccccaggacatgtttgtggagtccatgttctctctggctgacaaggatggcaatggctacctgtccttccgagagttcctggacatcctggtggtcttcatgaaaggctccccagaggataagtcccgtctaatgtttaccatgtatgacctggatgagaatggcttcctctccaaggacgaattcttcaccatgatgcgatccttcatcgagatctccaacaactgcctgtccaaggcccagctggccgaggtggtggagtctatgttccgggagtcgggattccaggacaaggaggagctgacatgggaggattttcacttcatgctgcgggaccatgacagcgagctccgcttcacgcagctctgtgtcaaaggtggaggtggaggtggaaatggtattagagatatctttaaacaaaacatcagctgtcgagtctcgttcatcactcggacacctggggagcgctcccacccccagggactggggccccctgccccagaagccccagagctgggaggccctggactgaagaagaggtttggcaaaaaggcagcagtgcccactccccggctgtacacagaggcgctgcaagagaagatgcagcgaggcttcctagcccaaaagctgcagcagtacaagcgcttcgtggagaactaccggaggcacatcgtgtgtgtggcaatcttctcggccatctgtgttggcgtgtttgcagatcgtgcttactactatggctttgcctcgccaccctcggacattgcacagaccaccctcgtgggcatcatcctgtcacgaggcacggcggccagcgtctccttcatgttctcttatatcttgctcaccatgtgccgcaacctcataaccttcctgcgagagactttcctcaaccgctatgtgccttttgatgccgcagtggacttccaccgctggatcgccatggctgctgttgtcctggccattttgcacagtgctggccacgcagtcaatgtctacatcttctcagtcagcccactcagcctgctggcctgcatattccccaacgtctttgtgaatgatgggtccaagcttccccagaagttctattggtggttcttccagaccgtcccaggtatgacaggtgtgcttctgctcctggtcctggccatcatgtatgtcttcgcctcccaccacttccgccgccgcagcttccggggcttctggctgacccaccacctctacatcctgctctatgccctgctcatcatccatggcagctatgctctgatccagctgcccactttccacatctacttcctggtcccggcaatcatctatggaggtgacaagctggtgagcctgagccggaagaaggtggagatcagcgtggtgaaggcggagctgctgccctcaggagtgacctacctgcaattccagaggccccaaggctttgagtacaagtcaggacagtgggtgcggatcgcctgcctggctctggggaccaccgagtaccaccccttcacactgacctccgcgccccatgaggacacactcagcctgcacatccgggcagtggggccctggaccactcgcctcagggagatctactcatccccaaagggcaatggctgtgctggatacccaaagctgtaccttgatggaccgtttggagagggccatcaggagtggcataaatttgaggtgtcagtgttggtgggagggggcattggggtcaccccctttgcctccatcctcaaagacctggtcttcaagtcatccttgggcagccaaatgctgtgtaagaagatctacttcatctgggtgacacggacccagcgtcagtttgagtggctggctgacatcatccaagaggtggaggagaacgaccaccaggacctggtgtctgtgcacatttatgtcacccagctggctgagaagttcgacctcaggaccaccatgctatacatctgcgagcggcacttccagaaagtgctgaaccggagtctgttcacgggcctgcgctccatcacccactttggccgtccccccttcgagcccttcttcaactccctgcaggaggtccacccacaggtgcgcaagatcggggtgttcagctgcggccctccaggaatgaccaagaatgtagagaaggcctgtcagctcgtcaacaggcaggaccgagcccacttcatgcaccactatgagaacttctga

SEQ ID NO: 22 - DNA, 1113 bp, Homo sapiens
atggcaggcccccgatacccagtttcagtgcaaggggcagccctggtgcagatcaagaggctccaaacgtttgccttctctgtgcgctggtcagacggcagcgacaccttcgtgcgcaggagttgggacgaattcaggcagctcaagaccctcaaggagaccttcccggtggaggcgggcctgctgcggagatctgaccgcgttctcccaaagcttctcgatgcaccactgttgggacgcgtggggcgcacgagccgcggcctggcgcgcctgcagctgttggaaacctattctcggaggctgctggcgactgcagagcgcgtggcacggagcccgacgatcactggcttcttcgcaccgcaacccctggacctggagcccgcgctgccacccggcagccgggtgatcctgcccaccccagaggagcagcctctttctcgcgctgcgggccgcctctccatccacagtctggaggctcagagcctgcgctgcctgcagcccttctgtacccaggacacgcgggataggccttttcaggcgcaggcccaggagagcctggacgtgctgctgcggcacccctcaggctggtggctggtggagaacgaagaccggcagaccgcctggtttccagcgccctacctggaggaggcggccccgggccaaggccgggagggaggcccgtccctagggagcagcggtccccagttctgtgcttcccgcgcctacgagagcagccgcgcagatgagctgtccgtgcccgcgggggcgcgcgtgcgcgtgttggaaacgtcagaccgcggctggtggctatgcaggtacggcgaccgggcgggcctactccccgcggtgctgctgcggccggaagggctgggcgctctcctgagcgggacggggttccgtggaggagacgacccggcgggtgaggcccggggcttccctgaaccctcccaggccaccgcccctccccccaccgtgcccacccgaccttcgccgggcgccatccagagccgctgctgcaccgtcacacgcagggccctggagcggcgcccacggcgccagggccgccctcgagggtgcgtggactctgtgccgcaccccacgacggagcagtga

SEQ ID NO: 23 - DNA, 1116 bp, Homo sapiens
atggcaggcccccgatacccagtttcagtgcaaggggcagccctggtgcagatcaagaggctccaaacgtttgccttctctgtgcgctggtcagacggcagcgacaccttcgtgcgcaggagttgggacgaattcaggcagctcaagaagaccctcaaggagaccttcccggtggaggcgggcctgctgcggagatctgaccgcgttctcccaaagcttctcgatgcaccactgttgggacgcgtggggcgcacgagccgcggcctggcgcgcctgcagctgttggaaacctattctcggaggctgctggcgactgcagagcgcgtggcacggagcccgacgatcactggcttcttcgcaccgcaacccctggacctggagcccgcgctgccacccggcagccgggtgatcctgcccaccccagaggagcagcctctttctcgcgctgcgggccgcctctccatccacagtctggaggctcagagcctgcgctgcctgcagcccttctgtacccaggacacgcgggataggccttttcaggcgcaggcccaggagagcctggacgtgctgctgcggcacccctcaggctggtggctggtggagaacgaagaccggcagaccgcctggtttccagcgccctacctggaggaggcggccccgggccaaggccgggagggaggcccgtccctagggagcagcggtccccagttctgtgcttcccgcgcctacgagagcagccgcgcagatgagctgtccgtgcccgcgggggcgcgcgtgcgcgtgttggaaacgtcagaccgcggctggtggctatgcaggtacggcgaccgggcgggcctactccccgcggtgctgctgcggccggaagggctgggcgctctcctgagcgggacggggttccgtggaggagacgacccggcgggtgaggcccggggcttccctgaaccctcccaggccaccgcccctccccccaccgtgcccacccgaccttcgccgggcgccatccagagccgctgctgcaccgtcacacgcagggccctggagcggcgcccacggcgccagggccgccctcgagggtgcgtggactctgtgccgcaccccacgacggagcagtga

SEQ ID NO: 24 - DNA, 1131 bp, Homo sapiens
atggcaggcccccgatacccagtttcagtgcaaggggcagccctggtgcagatcaagaggctccaaacgtttgccttctctgtgcgctggtcagacggcagcgacaccttcgtgcgcaggagttgggacgaattcaggcagctcaagaagaccctcaaggagaccttcccggtggaggcgggcctgctgcggagatctgaccgcgttctcccaaagcttctcggtcaggccagcctggatgcaccactgttgggacgcgtggggcgcacgagccgcggcctggcgcgcctgcagctgttggaaacctattctcggaggctgctggcgactgcagagcgcgtggcacggagcccgacgatcactggcttcttcgcaccgcaacccctggacctggagcccgcgctgccacccggcagccgggtgatcctgcccaccccagaggagcagcctctttctcgcgctgcgggccgcctctccatccacagtctggaggctcagagcctgcgctgcctgcagcccttctgtacccaggacacgcgggataggccttttcaggcgcaggcccaggagagcctggacgtgctgctgcggcacccctcaggctggtggctggtggagaacgaagaccggcagaccgcctggtttccagcgccctacctggaggaggcggccccgggccaaggccgggagggaggcccgtccctagggagcagcggtccccagttctgtgcttcccgcgcctacgagagcagccgcgcagatgagctgtccgtgcccgcgggggcgcgcgtgcgcgtgttggaaacgtcagaccgcggctggtggctatgcaggtacggcgaccgggcgggcctactccccgcggtgctgctgcggccggaagggctgggcgctctcctgagcgggacggggttccgtggaggagacgacccggcgggtgaggcccggggcttccctgaaccctcccaggccaccgcccctccccccaccgtgcccacccgaccttcgccgggcgccatccagagccgctgctgcaccgtcacacgcagggccctggagcggcgcccacggcgccagggccgccctcgagggtgcgtggactctgtgccgcaccccacgacggagcagtga

SEQ ID NO: 25 - DNA, 1173 bp, Homo sapiens
atgggggacaccttcatccgtcacatcgccctgctgggctttgagaagcgcttcgtacccagccagcactatgtgtacatgttcctggtgaaatggcaggacctgtcggagaaggtggtctaccggcgcttcaccgagatctacgagttccataaaaccttaaaagaaatgttccctattgaggcaggggcgatcaatccagagaacaggatcatcccccacctcccagctcccaagtggtttgacgggcagcgggccgccgagaaccgccagggcacacttaccgagtactgcggcacgctcatgagcctgcccaccaagatctcccgctgtccccacctcctcgacttcttcaaggtgcgccctgatgacctcaagctccccacggacaaccagacaaaaaagccagagacatacttgatgcccaaagatggcaagagtaccgcgacagacatcaccggccccatcatcctgcagacgtaccgcgccattgccaactacgagaagacctcgggctccgagatggctctgtccacgggggacgtggtggaggtcgtagagaagagcgagagcggttggtggttctgtcagatgaaagcaaagcgaggctggatcccagcgtccttcctcgagcccctggacagtcctgacgagacggaagaccctgagcccaactatgcaggtgagccatacgtcgccatcaaggcctacactgctgtggagggggacgaggtgtccctgctcgagggtgaagctgttgaggtcattcacaagctcctggacggctggtgggtcatcaggaaagacgacgtcacaggctacttcccgtccatgtacctgcaaaagtcagggcaagacgtgtcccaggcccaacgccagatcaagcggggggcgccgccccgcaggtcgtccatccgcaacgcgcacagcatccaccagcggtcgcggaagcgcctcagccaggacgcctatcgccgcaacagcgtccgttttctgcagcagcgacgccgccaggcgcggccgggaccgcagagccccgggagcccgctcgaggaggagcggcagacgcagcgctctaaaccgcagccggcggtgcccccgcggccgagcgccgacctcatcctgaaccgctgcagcgagagcaccaagcggaagctggcgtctgccgtctga

SEQ ID NO: 26 - DNA, 1452 bp, Homo sapiens
atggcctctctgggggacctggtgcgcgcctggcacctgggcgcgcaggctgtggatcgtggggactgggcccgcgccttgcacctcttctcgggcgtcccggcgccgcccgccaggctgtgcttcaacgcgggctgcgtgcacctgctggccggggaccccgaggccgcgctgcgggcatttgaccaagccgtgaccaaggacacctgcatggcggttggcttcttccagcgaggagtggccaacttccagctggcaaggttccaggaggctctgtctgacttctggctggccctggagcagctgaggggccacgctgccatcgactacacgcagctgggcctgcggttcaagctgcaagcctgggaggtgctacacaatgtggcgtcggcacagtgccagctggggctctggacagaggcggccagcagcctaagggaggccatgtccaagtggccggaggggtccctgaatggcctggactcagccctggaccaagtgcagagacggggctcactgccgccacggcaggtccccaggggcgaggtcttccggccccaccggtggcacctgaagcacttggagcccgtggatttcctgggcaaggccaaggtggtggcctctgccatccccgacgaccagggctggggcgtccgccctcagcagccacagggaccaggagcgaaccatgatgccaggtccctaatcatggactccccaagagctggcacccaccagggccccctcgatgcagagacagaggtcggtgctgaccgctgcacgtcgactgcctaccaggagcagaggccccaggtggagcaagttggcaaacaggctcctctctccccagggctgccggcaatgggggggcctggccccggcccctgtgaggaccccgcgggtgctgggggagcaggtgcagggggctccgagcccctggtgactgtcaccgtgcagtgcgccttcacagtggccctgagggcacgaagaggagccgacctgtccagcctgcgggcactgctgggccaagccctccctcaccaggcccagcttgggcaactcagttacctagccccaggtgaggacgggcactgggtccccatccccgaggaggagtcgctgcagagggcctggcaggacgcagctgcctgccccagggggctgcagctgcagtgcaggggagccgggggtcggccggtcctctaccaggtggtggcccagcacagctactccgcccaggggccagaggacctgggcttccgacagggggacacggtggacgtcctgtgtgaagagcccgatgtcccccttgcagtggaccaggcatggctggagggccactgtgacggccgcatcggcatcttccccaagtgcttcgtggtccccgccggccctcggatgtcaggagcccccggccgcctgccccgatcccagcagggagatcagccctaa

SEQ ID NO: 27 - DNA, 1581 bp, Homo sapiens
atgtccctggtggaggccatcagcctctggaatgaaggggtgctggcagcggacaagaaggactggaagggagccctggatgccttcagtgccgtccaggacccccactcccggatttgcttcaacattggctgcatgtacactatcctgaagaacatgactgaagcagagaaggcctttaccagaagcattaaccgagacaagcacttggcagtggcttacttccaacgagggatgctctactaccagacagagaaatatgatttggctatcaaagaccttaaagaagccttgattcagcttcgagggaaccagctgatagactataagatcctggggctccagttcaagctgtttgcctgtgaggtgttatataacattgctttcatgtatgccaagaaggaggaatggaaaaaagctgaagaacagttagcattggccacgagcatgaagtctgagcccagacattccaaaatcgacaaggcgatggagtgtgtctggaagcagaagctatatgagccagtggtgatccctgtgggcaagctgtttcgaccaaatgagagacaagtggctcagctggccaagaaggattacctaggcaaggcgacggtcgtggcatctgtggtggatcaagacagtttctctgggtttgcccctctgcaaccacaggcagctgagcctccacccagaccgaaaaccccagagatcttcagggctctggaaggggaggctcaccgtgtgctatttgggtttgtgcctgagacaaaagaagagctccaggtcatgccagggaacattgtctttgtcttgaagaagggcaatgataactgggccacggtcatgttcaacgggcagaaggggcttgttccctgcaactaccttgaaccagttgagctgcggatccaccctcagcagcagccccaggaggaaagctctccgcagtccgacatcccagctcctcctagttccaaagcccctggaagaccccagctgtcaccaggccagaaacaaaaagaagagcctaaggaagtgaagctcagtgttcccatgccctacacactcaaggtgcactacaagtacacggtagtcatgaagactcagcccgggctcccctacagccaggtccgggacatggtgtctaagaaactggagctccggctggaacacactaagctgagctatcggcctcgggacagcaatgagctggtgcccctttcagaagacagcatgaaggatgcctggggccaggtgaaaaactactgcctgactctgtggtgtgagaacacagtgggtgaccaaggctttccagatgaacccaaggaaagtgaaaaagctgatgctaataaccagacaacagaacctcagcttaagaaaggcagccaagtggaggcactcttcagttatgaggctacccaaccagaggacctggagtttcaggaaggggatataatcctggtgttatcaaaggtgaatgaagaatggctggaaggggagtgcaaagggaaggtgggcattttccccaaagtttttgttgaagactgcgcaactacagatttggaaagcactcggagagaagtctag

SEQ ID NO: 28 - DNA, 588 bp, Homo sapiens
atggggcagatcgagtgggccatgtgggccaacgaacaggcgctggcgtccggcctgatcctcatcaccgggggcatcgtggccacagctgggcgcttcacccagtggtactttggtgcctactccattgtggcgggcgtgtttgtgtgcctgctggagtacccccgggggaagaggaagaagggctccaccatggagcgctggggacagaagtacatgaccgccgtggtgaagctgttcgggccctttaccaggaattactatgttcgggccgtcctgcatctcctgctctcggtgcccgccggcttcctgctggccaccatccttgggaccgcctgcctggccattgcgagcggcatctacctactggcggctgtgcgtggcgagcagtggacgcccatcgagcccaagccccgggagcggccgcagatcggaggcaccatcaagcagccgcccagcaaccccccgccgcggcccccggccgaggcccgcaagaagcccagcgaggaggaggctgcggtggcggcggggggacccccgggaggtccccaggtcaaccccatcccggtgaccgacgaggtcgtgtga

SEQ ID NO: 29 - DNA, 804 bp, Homo sapiens
atgaccctcggccgccgactcgcgtgtcttttcctcgcctgtgtcctgccggccttgctgctggggggcaccgcgctggcctcggagattgtggggggccggcgagcgcggccccacgcgtggcccttcatggtgtccctgcagctgcgcggaggccacttctgcggcgccaccctgattgcgcccaacttcgtcatgtcggccgcgcactgcgtggcgaatgtaaacgtccgcgcggtgcgggtggtcctgggagcccataacctctcgcggcgggagcccacccggcaggtgttcgccgtgcagcgcatcttcgaaaacggctacgaccccgtaaacttgctcaacgacatcgtgattctccagctcaacgggtcggccaccatcaacgccaacgtgcaggtggcccagctgccggctcagggacgccgcctgggcaacggggtgcagtgcctggccatgggctggggccttctgggcaggaaccgtgggatcgccagcgtcctgcaggagctcaacgtgacggtggtgacgtccctctgccgtcgcagcaacgtctgcactctcgtgaggggccggcaggccggcgtctgtttcggggactccggcagccccttggtctgcaacgggctaatccacggaattgcctccttcgtccggggaggctgcgcctcagggctctaccccgatgcctttgccccggtggcacagtttgtaaactggatcgactctatcatccaacgctccgaggacaacccctgtccccacccccgggacccggacccggccagcaggacccactga

SEQ ID NO: 30 - DNA, 225 bp, Homo sapiens
atgaagacagccacagtctttgttctggtagctttgattttcatgacaatgactactgcctgggctctgtctaaccccaaagaaaaacctggcgcttgtcctaagccgcccccacgcagttttggaacttgtgatgaacgatgcacaggagatggatcgtgctctggcaacatgaagtgctgcagcaatggctgtggtcatgcctgcaaacctcctgtcttttaa

SEQ ID NO: 31 - DNA, 2583 bp, Homo sapiens
atggggccctggggctggaaattgcgctggaccgtcgccttgctcctcgccgcggcggggactgcagtgggcgacagatgcgaaagaaacgagttccagtgccaagacgggaaatgcatctcctacaagtgggtctgcgatggcagcgctgagtgccaggatggctctgatgagtcccaggagacgtgcttgtctgtcacctgcaaatccggggacttcagctgtgggggccgtgtcaaccgctgcattcctcagttctggaggtgcgatggccaagtggactgcgacaacggctcagacgagcaaggctgtccccccaagacgtgctcccaggacgagtttcgctgccacgatgggaagtgcatctctcggcagttcgtctgtgactcagaccgggactgcttggacggctcagacgaggcctcctgcccggtgctcacctgtggtcccgccagcttccagtgcaacagctccacctgcatcccccagctgtgggcctgcgacaacgaccccgactgcgaagatggctcggatgagtggccgcagcgctgtaggggtctttacgtgttccaaggggacagtagcccctgctcggccttcgagttccactgcctaagtggcgagtgcatccactccagctggcgctgtgatggtggccccgactgcaaggacaaatctgacgaggaaaactgcgctgtggccacctgtcgccctgacgaattccagtgctctgatggaaactgcatccatggcagccggcagtgtgaccgggaatatgactgcaaggacatgagcgatgaagttggctgcgttaatgtgacactctgcgagggacccaacaagttcaagtgtcacagcggcgaatgcatcaccctggacaaagtctgcaacatggctagagactgccgggactggtcagatgaacccatcaaagagtgcgggaccaacgaatgcttggacaacaacggcggctgttcccacgtctgcaatgaccttaagatcggctacgagtgcctgtgccccgacggcttccagctggtggcccagcgaagatgcgaagatatcgatgagtgtcaggatcccgacacctgcagccagctctgcgtgaacctggagggtggctacaagtgccagtgtgaggaaggcttccagctggacccccacacgaaggcctgcaaggctgtgggctccatcgcctacctcttcttcaccaaccggcacgaggtcaggaagatgacgctggaccggagcgagtacaccagcctcatccccaacctgaggaacgtggtcgctctggacacggaggtggccagcaatagaatctactggtctgacctgtcccagagaatgatctgcagcacccagcttgacagagcccacggcgtctcttcctatgacaccgtcatcagcagagacatccaggcccccgacgggctggctgtggactggatccacagcaacatctactggaccgactctgtcctgggcactgtctctgttgcggataccaagggcgtgaagaggaaaacgttattcagggagaacggctccaagccaagggccatcgtggtggatcctgttcatggcttcatgtactggactgactggggaactcccgccaagatcaagaaagggggcctgaatggtgtggacatctactcgctggtgactgaaaacattcagtggcccaatggcatcaccctagatctcctcagtggccgcctctactgggttgactccaaacttcactccatctcaagcatcgatgtcaacgggggcaaccggaagaccatcttggaggatgaaaagaggctggcccaccccttctccttggccgtctttgaggacaaagtattttggacagatatcatcaacgaagccattttcagtgccaaccgcctcacaggttccgatgtcaacttgttggctgaaaacctactgtccccagaggatatggttctcttccacaacctcacccagccaagaggagtgaactggtgtgagaggaccaccctgagcaatggcggctgccagtatctgtgcctccctgccccgcagatcaacccccactcgcccaagtttacctgcgcctgcccggacggcatgctgctggccagggacatgaggagctgcctcacagaggctgaggctgcagtggccacccaggagacatccaccgtcaggctaaaggtcagctccacagccgtaaggacacagcacacaaccacccgacctgttcccgacacctcccggctgcctggggccacccctgggctcaccacggtggagatagtgacaatgtctcaccaagctctgggcgacgttgctggcagaggaaatgagaagaagcccagtagcgtgagggctctgtccattgtcctccccatcgtgctcctcgtcttcctttgcctgggggtcttccttctatggaagaactggcggcttaagaacatcaacagcatcaactttgacaaccccgtctatcagaagaccacagaggatgaggtccacatttgccacaaccaggacggctacagctacccctcgagacagatggtcagtctggaggatgacgtggcgtga

SEQ ID NO: 32 - DNA, 2361 bp, Homo sapiens
atgactagcatcttccattttgccattatcttcatgttaatacttcagatcagaatacaattatctgaagaaagtgaatttttagttgataggtcaaaaaacggtctcatccacgttcctaaagacctatcccagaaaacaacaatcttaaatatatcgcaaaattatatatctgagctttggacttctgacatcttatcactgtcaaaactgaggattttgataatttctcataatagaatccagtatcttgatatcagtgttttcaaattcaaccaggaattggaatacttggatttgtcccacaacaagttggtgaagatttcttgccaccctactgtgaacctcaagcacttggacctgtcatttaatgcatttgatgccctgcctatatgcaaagagtttggcaatatgtctcaactaaaatttctggggttgagcaccacacacttagaaaaatctagtgtgctgccaattgctcatttgaatatcagcaaggtcttgctggtcttaggagagacttatggggaaaaagaagaccctgagggccttcaagactttaacactgagagtctgcacattgtgttccccacaaacaaagaattccattttattttggatgtgtcagtcaagactgtagcaaatctggaactatctaatatcaaatgtgtgctagaagataacaaatgttcttacttcctaagtattctggcgaaacttcaaacaaatccaaagttatcaaatcttaccttaaacaacattgaaacaacttggaattctttcattaggatcctccagctggtttggcatacaactgtatggtatttctcaatttcaaacgtgaagctacagggtcagctggacttcagagattttgattattctggcacttccttgaaggccttgtctatacaccaagttgtcagcgatgtgttcggttttccgcaaagttatatctatgaaatcttttcgaatatgaacatcaaaaatttcacagtgtctggtacacgcatggtccacatgctttgcccatccaaaattagcccgttcctgcatttggatttttccaataatctcttaacagacacggtttttgaaaattgtgggcaccttactgagttggagacacttattttacaaatgaatcaattaaaagaactttcaaaaatagctgaaatgactacacagatgaagtctctgcaacaattggatattagccagaattctgtaagctatgatgaaaagaaaggagactgttcttggactaaaagtttattaagtttaaatatgtcttcaaatatacttactgacactattttcagatgtttacctcccaggatcaaggtacttgatcttcacagcaataaaataaagagcattcctaaacaagtcgtaaaactggaagctttgcaagaactcaatgttgctttcaattctttaactgaccttcctggatgtggcagctttagcagcctttctgtattgatcattgatcacaattcagtttcccacccatcggctgatttcttccagagctgccagaagatgaggtcaataaaagcaggggacaatccattccaatgtacctgtgagctaggagaatttgtcaaaaatatagaccaagtatcaagtgaagtgttagagggctggcctgattcttataagtgtgactacccggaaagttatagaggaaccctactaaaggactttcacatgtctgaattatcctgcaacataactctgctgatcgtcaccatcgttgccaccatgctggtgttggctgtgactgtgacctccctctgcagctacttggatctgccctggtatctcaggatggtgtgccagtggacccagacccggcgcagggccaggaacatacccttagaagaactccaaagaaatctccagtttcatgcatttatttcatatagtgggcacgattctttctgggtgaagaatgaattattgccaaacctagagaaagaaggtatgcagatttgccttcatgagagaaactttgttcctggcaagagcattgtggaaaatatcatcacctgcattgagaagagttacaagtccatctttgttttgtctcccaactttgtccagagtgaatggtgccattatgaactctactttgcccatcacaatctctttcatgaaggatctaatagcttaatcctgatcttgctggaacccattccgcagtactccattcctagcagttatcacaagctcaaaagtctcatggccaggaggacttatttggaatggcccaaggaaaagagcaaacgtggccttttttgggctaacttaagggcagccattaatattaagctgacagagcaagcaaagaaatag

SEQ ID NO: 33 - DNA, 5745 bp, Homo sapiens
atggcggacggaaagggagacgccgccgctgtcgccggggctggggctgaggctccggcggtagcgggagccggagatggagtcgagactgagtccatggttcggggtcatcgccccgtatctccagcgccgggagcctcgggactgcggccgtgtctgtggcagctggagacagagctgagggagcaagaggtgtcggaggtctcatctttgaactactgccggagcttctgccagaccttattgcaatatgcaagcaacaagaatgcatcagaacatattgtgtatcttctggaggtatatcgacttgccatccaaagctttgccagtgcacgtccatacttaactactgaatgtgaagatgtcctcttagtgcttggcagattagtactgagttgtttcgaattactgctttcagtgtctgaaagtgaactgccatgtgaagtctggctaccattccttcagtctctacaggagtcacatgatgcattattggaatttgggaataataacctacaaatattggttcatgttaccaaggaaggggtgtggaaaaacccagttcttcttaaaattctgtctcaacagccagtagaaacggaggaagtcaataaattgattgcacaagaaggaccttcctttctgcaaatgcgaataaaacatttgttgaaatctaactgcatcccccaggctactgctttatcaaaactatgtgcagaatctaaagaaatttcaaatgtgtcatcttttcagcaagcctatatcacatgtttatgttctatgctccctaatgaagatgctattaaggagattgcaaaggtcgactgcaaggaagtactagacatcatttgtaatctggaatctgaggggcaggataacacagcatttgttctttgtacgacttaccttacccagcagctccaaactgcaagtgtatattgttcttgggaactgactcttttttggagtaaactgcaaagaagaattgacccttctttagatacttttttggagcgctgtcgtcagtttggtgtcatagctaaaacgcagcagcatttattttgcctcattagagttatacaaactgaagcacaagatgctggtcttggggtgtcaattttactgtgtgtcagagctcttcaactcagatcaagtgaagatgaggaaatgaaggcatcagtttgtaaaacaattgcctgtcttttaccagaagatttagaagttagacgagcctgtcagcttacagaattcttaattgaacccagtttggatggatttaatatgttagaagaactatatttgcaaccagatcaaaaatttgatgaagaaaatgcaccggttccaaattctcttcgatgtgagctcttactagctttaaaagcccactggccttttgatcctgagttttgggactggaaaactttaaaacgacactgccaccaacttttaggacaagaagcctcagattctgatgatgatttaagtggctatgaaatgtccattaatgacacagatgttttagagtcatttctcagtgactatgatgagggtaaagaagataaacaatatagaagaagagatttgacagatcagcataaggagaaaagagacaaaaaacctattggctcttctgaaagatatcagaggtggcttcagtacaagtttttctgtttgttatgtaagcgggaatgtatagaggctagaattcttcatcattctaagatgcatatggaagatggaatttacacctgtccagtttgtattaaaaaatttaagagaaaagaaatgtttgttcctcatgtgatggagcatgttaaaatgccaccaagcagaagggaccgctctaaaaagaaattactgttaaaaggctctcaaaagggtatttgtcctaagagcccctctgcaatcccagagcaaaaccattcattgaatgaccaagccaaaggagagtctcatgaatatgtcacattcagcaaattagaagattgccacctgcaagacagagatttgtatccatgtcccggtacagactgttcccgtgtgtttaagcaatttaaatacttaagtgtgcatcttaaagctgaacaccaaaataatgatgaaaatgccaagcactacttggatatgaaaaatagaagagagaagtgtacttactgtcgacgacattttatgtctgcttttcaccttcgagagcacgaacaagtgcattgtgggcctcagccttatatgtgtgtatctatagattgctatgctaggtttggatcagtaaatgaactacttaaccataaacaaaagcatgacgatctgcgttacaaatgtgaattaaatggctgtaatattgttttcagtgacttgggacagctttaccaccatgaagcacaacactttagggatgcatcttacacatgcaacttccttggctgtaaaaagttctattactccaaaattgaataccagaatcacctctcaatgcataatgttgaaaattcaaatggagacataaagaaatcagtgaaacttgaggagtctgcaacaggtgaaaagcaagattgtattaatcagccccatctacttaaccaaactgataaatcacatttacctgaagatcttttctgtgcagaatcagctaattctcaaatagatacagaaactgcagaaaacctgaaagaaaacagtgacagtaattctagtgatcagttaagtcatagctcttcagcttcaatgaatgaagagctaattgacacactagatcactctgaaactatgcaggatgtattgttatctaatgagaaagtctttgggccctccagtttaaaagaaaaatgttccagtatggcagtttgttttgacgggactaagtttacctgtggttttgatggctgtggttccacatacaaaaatgcaagaggaatgcagaaacatttacggaaggttcatccataccatttcaagcccaaaaagataaagacgaaagatctgtttccctctttgggtaatgaacataatcagacaactgaaaagttggatgcagaacctaaaccctgctcagatacaaacagtgactccccagatgaaggtctagatcacaatattcacattaaatgtaaacgagaacatcaaggttattcctcagaatcctccatttgtgcttctaaaaggccctgtacagaggataccatgttggaacttctgttacgcttgaaacatttaagcttgaaaaactcaataacacatggatctttctcagggtcattgcaggggtacccatccagtggtgctaagtctcttcagtcagtttcatctatctcagaccttaattttcagaatcaagatgaaaacatgccaagtcagtaccttgcacagttggcggctaagccgtttttctgtgagcttcaaggatgcaaatatgaatttgtgaccagagaggctctgttaatgcattatcttaaaaagcataattattcaaaagaaaaagtccttcagttaaccatgttccaacatcggtattccccatttcagtgtcatatttgccaaaggtcatttacaagaaaaacacaccttaggattcattataaaaataaacatcaaattggcagtgacagagcaactcacaaactattagataatgaaaagtgtgatcatgaaggcccatgttcagtagataggttgaaaggtgattgttctgcagaacttggaggtgatcccagtagtaactctgagaaaccacactgtcatcctaaaaaggatgaatgtagttctgaaacagatttggaatcatcttgtgaagaaacagaaagtaaaacatctgacatttcatcaccaataggcagccatagagaagaacaagaaggaagagagggcagaggtagcaggcgaactgttgctaaaggaaatctgtgttatattttgaataaataccacaaaccattccattgtattcataaaacttgcaactcctcattcaccaatctaaaaggcttaattcgccattacagaactgtacatcagtacaacaaagaacagttatgtttggagaaagacaaagcaagaaccaaaagggaacttgtcaaatgtaaaaagatatttgcttgcaaatataaggaatgtaataaacgcttcctgtgttccaaagctcttgctaagcactgtagtgattctcataacctagaccatattgaagagcctaaagtactttccgaagctggatctgcagcaaggttttcttgtaaccagcctcagtgccctgctgttttttatacattcaacaagttgaagcaccacttgatggaacagcataatattgaaggggaaatacattcagattatgaaattcattgtgatcttaatggctgtggccagattttcacccatcgcagtaattactcacaacatgtatattaccgacataaagactattatgatgatttgtttagaagccagaaagtagcaaatgagagactactaaggagtgaaaaggtatgtcaaacagctgatactcaggggcatgaacatcagaccaccaggagatcatttaatgctaagtctaaaaaatgtggcttaatcaaagaaaagaaagccccaataagttttaaaaccagagctgaggccctccatatgtgtgtggagcactctgagcacacacagtacccctgcatggttcaaggatgcttatctgtggtgaagttggagagcagcattgtgaggcattacaaacgcactcatcagatgagtagtgcctatttagagcaacagatggagaatcttgttgtttgcgttaagtacggtaccaaaattaaggaggaacccccttctgaagcagatccctgtataaagaaagaagaaaatagaagctgtgaatcagagcgcacagaacacagccattccccgggtgacagtagtgcacccatccagaacactgattgctgtcattcaagtgaaagggatggaggtcagaaagggtgcatagaaagcagctcagtatttgatgcagatactctgctctacaggggaactttgaaatgtaatcatagttccaaaaccacttccctagaacagtgtaatatagttcagcctcctcctccttgtaaaatagaaaattccatacctaatcccaatgggactgaaagtgggacttatttcacaagtttccagctgcctttaccaaggatcaaagaatcagaaactaggcagcatagttcagggcaagaaaacactgtaaaaaatccaacccatgtcccaaaagagaattttaggaaacattcacagccccggtcatttgatttgaagacttacaaacctatgggatttgaatcttcatttctgaaatttattcaggaaagtgaagagaaagaagatgattttgatgattgggagccttcagagcacttaacattaagtaattcttcacagtccagtaatgatttaacagggaatgttgtggcaaataatatggtgaatgacagtgaacctgaagttgacatacctcattcttccagtgactctacaattcatgagaacctgactgcaatcccacctttaatagtagctgaaacaacaacagttccttccttggaaaacctgagggttgtattggacaaagcattaacagactgtggagagcttgccttaaaacagcttcattatcttcggccagtggtggttcttgaaagatctaagttttccacaccaattttagacttatttccaacaaaaaagacagatgagctttgtgtaggaagttcataa

SEQ ID NO: 34 - DNA, 738 bp, Homo sapiens
atggcggcggctatcgccagctcgctcatccgtcagaagaggcaagcccgcgagcgcgagaaatccaacgcctgcaagtgtgtcagcagccccagcaaaggcaagaccagctgcgacaaaaacaagttaaatgtcttttcccgggtcaaactcttcggctccaagaagaggcgcagaagaagaccagagcctcagcttaagggtatagttaccaagctatacagccgacaaggctaccacttgcagctgcaggcggatggaaccattgatggcaccaaagatgaggacagcacttacactctgtttaacctcatccctgtgggtctgcgagtggtggctatccaaggagttcaaaccaagctgtacttggcaatgaacagtgagggatacttgtacacctcggaacttttcacacctgagtgcaaattcaaagaatcagtgtttgaaaattattatgtgacatattcatcaatgatataccgtcagcagcagtcaggccgagggtggtatctgggtctgaacaaagaaggagagatcatgaaaggcaaccatgtgaagaagaacaagcctgcagctcattttctgcctaaaccactgaaagtggccatgtacaaggagccatcactgcacgatctcacggagttctcccgatctggaagcgggaccccaaccaagagcagaagtgtctctggcgtgctgaacggaggcaaatccatgagccacaatgaatcaacgtag

SEQ ID NO: 35 - DNA, 579 bp, Homo sapiens
atggctttgttaaggaagtcgtattcagagcctcagcttaagggtatagttaccaagctatacagccgacaaggctaccacttgcagctgcaggcggatggaaccattgatggcaccaaagatgaggacagcacttacactctgtttaacctcatccctgtgggtctgcgagtggtggctatccaaggagttcaaaccaagctgtacttggcaatgaacagtgagggatacttgtacacctcggaacttttcacacctgagtgcaaattcaaagaatcagtgtttgaaaattattatgtgacatattcatcaatgatataccgtcagcagcagtcaggccgagggtggtatctgggtctgaacaaagaaggagagatcatgaaaggcaaccatgtgaagaagaacaagcctgcagctcattttctgcctaaaccactgaaagtggccatgtacaaggagccatcactgcacgatctcacggagttctcccgatctggaagcgggaccccaaccaagagcagaagtgtctctggcgtgctgaacggaggcaaatccatgagccacaatgaatcaacgtag

SEQ ID NO: 36 - DNA, 684 bp, Homo sapiens
atggggtggctttgctctgggctcctgttccctgtgagctgcctggtcctgctgcaggtggcaagctctgggaacatgaaggtcttgcaggagcccacctgcgtctccgactacatgagcatctctacttgcgagtggaagatgaatggtcccaccaattgcagcaccgagctccgcctgttgtaccagctggtttttctgctctccgaagcccacacgtgtatccctgagaacaacggaggcgcggggtgcgtgtgccacctgctcatggatgacgtggtcagtgcggataactatacactggacctgtgggctgggcagcagctgctgtggaagggctccttcaagcccagcgagcatgtgaaacccagggccccaggaaacctgacagttcacaccaatgtctccgacactctgctgctgacctggagcaacccgtatccccctgacaattacctgtataatcatctcacctatgcagtcaacatttggagtgaaaacgacccggcagatttcagaatctataacgtgacctacctagaaccctccctccgcatcgcagccagcaccctgaagtctgggatttcctacagggcacgggtgagggcctgggctcagtgctataacaccacctggagtgagtggagccccagcaccaagtggcacaactcaaatatttgctga

SEQ ID NO: 37 - DNA, 2478 bp, Homo sapiens
atggggtggctttgctctgggctcctgttccctgtgagctgcctggtcctgctgcaggtggcaagctctgggaacatgaaggtcttgcaggagcccacctgcgtctccgactacatgagcatctctacttgcgagtggaagatgaatggtcccaccaattgcagcaccgagctccgcctgttgtaccagctggtttttctgctctccgaagcccacacgtgtatccctgagaacaacggaggcgcggggtgcgtgtgccacctgctcatggatgacgtggtcagtgcggataactatacactggacctgtgggctgggcagcagctgctgtggaagggctccttcaagcccagcgagcatgtgaaacccagggccccaggaaacctgacagttcacaccaatgtctccgacactctgctgctgacctggagcaacccgtatccccctgacaattacctgtataatcatctcacctatgcagtcaacatttggagtgaaaacgacccggcagatttcagaatctataacgtgacctacctagaaccctccctccgcatcgcagccagcaccctgaagtctgggatttcctacagggcacgggtgagggcctgggctcagtgctataacaccacctggagtgagtggagccccagcaccaagtggcacaactcctacagggagcccttcgagcagcacctcctgctgggcgtcagcgtttcctgcattgtcatcctggccgtctgcctgttgtgctatgtcagcatcaccaagattaagaaagaatggtgggatcagattcccaacccagcccgcagccgcctcgtggctataataatccaggatgctcaggggtcacagtgggagaagcggtcccgaggccaggaaccagccaagtgcccacactggaagaattgtcttaccaagctcttgccctgttttctggagcacaacatgaaaagggatgaagatcctcacaaggctgccaaagagatgcctttccagggctctggaaaatcagcatggtgcccagtggagatcagcaagacagtcctctggccagagagcatcagcgtggtgcgatgtgtggagttgtttgaggccccggtggagtgtgaggaggaggaggaggtagaggaagaaaaagggagcttctgtgcatcgcctgagagcagcagggatgacttccaggagggaagggagggcattgtggcccggctaacagagagcctgttcctggacctgctcggagaggagaatgggggcttttgccagcaggacatgggggagtcatgccttcttccaccttcgggaagtacgagtgctcacatgccctgggatgagttcccaagtgcagggcccaaggaggcacctccctggggcaaggagcagcctctccacctggagccaagtcctcctgccagcccgacccagagtccagacaacctgacttgcacagagacgcccctcgtcatcgcaggcaaccctgcttaccgcagcttcagcaactccctgagccagtcaccgtgtcccagagagctgggtccagacccactgctggccagacacctggaggaagtagaacccgagatgccctgtgtcccccagctctctgagccaaccactgtgccccaacctgagccagaaacctgggagcagatcctccgccgaaatgtcctccagcatggggcagctgcagcccccgtctcggcccccaccagtggctatcaggagtttgtacatgcggtggagcagggtggcacccaggccagtgcggtggtgggcttgggtcccccaggagaggctggttacaaggccttctcaagcctgcttgccagcagtgctgtgtccccagagaaatgtgggtttggggctagcagtggggaagaggggtataagcctttccaagacctcattcctggctgccctggggaccctgccccagtccctgtccccttgttcacctttggactggacagggagccacctcgcagtccgcagagctcacatctcccaagcagctccccagagcacctgggtctggagccgggggaaaaggtagaggacatgccaaagcccccacttccccaggagcaggccacagacccccttgtggacagcctgggcagtggcattgtctactcagcccttacctgccacctgtgcggccacctgaaacagtgtcatggccaggaggatggtggccagacccctgtcatggccagtccttgctgtggctgctgctgtggagacaggtcctcgccccctacaacccccctgagggccccagacccctctccaggtggggttccactggaggccagtctgtgtccggcctccctggcaccctcgggcatctcagagaagagtaaatcctcatcatccttccatcctgcccctggcaatgctcagagctcaagccagacccccaaaatcgtgaactttgtctccgtgggacccacatacatgagggtctcttag

SEQ ID NO: 38 - DNA, 1269 bp, Homo sapiens
atgagcagcagctgctcagggctgagcagggtcctggtggccgtggctacagccctggtgtctgcctcctccccctgcccccaggcctggggccccccaggggtccagtatgggcagccaggcaggtccgtgaagctgtgttgtcctggagtgactgccggggacccagtgtcctggtttcgggatggggagccaaagctgctccagggacctgactctgggctagggcatgaactggtcctggcccaggcagacagcactgatgagggcacctacatctgccagaccctggatggtgcacttgggggcacagtgaccctgcagctgggctaccctccagcccgccctgttgtctcctgccaagcagccgactatgagaacttctcttgcacttggagtcccagccagatcagcggtttacccacccgctacctcacctcctacaggaagaagacagtcctaggagctgatagccagaggaggagtccatccacagggccctggccatgcccacaggatcccctaggggctgcccgctgtgttgtccacggggctgagttctggagccagtaccggattaatgtgactgaggtgaacccactgggtgccagcacacgcctgctggatgtgagcttgcagagcatcttgcgccctgacccaccccagggcctgcgggtagagtcagtaccaggttacccccgacgcctgcgagccagctggacataccctgcctcctggccgtgccagccccacttcctgctcaagttccgtttgcagtaccgtccggcgcagcatccagcctggtccacggtggagccagctggactggaggaggtgatcacagatgctgtggctgggctgccccatgctgtacgagtcagtgcccgggactttctagatgctggcacctggagcacctggagcccggaggcctggggaactccgagcactgggaccataccaaaggagataccagcatggggccagctacacacgcagccagaggtggagcctcaggtggacagccctgctcctccaaggccctccctccaaccacaccctcggctacttgatcacagggactctgtggagcaggtagctgtgctggcgtctttgggaatcctttctttcctgggactggtggctggggccctggcactggggctctggctgaggctgagacggggtgggaaggatggatccccaaagcctgggttcttggcctcagtgattccagtggacaggcgtccaggagctccaaacctgtag

SEQ ID NO: 39 - DNA, 1173 bp, Homo sapiens
atgagcagcagctgctcagggctgagcagggtcctggtggccgtggctacagccctggtgtctgcctcctccccctgcccccaggcctggggccccccaggggtccagtatgggcagccaggcaggtccgtgaagctgtgttgtcctggagtgactgccggggacccagtgtcctggtttcgggatggggagccaaagctgctccagggacctgactctgggctagggcatgaactggtcctggcccaggcagacagcactgatgagggcacctacatctgccagaccctggatggtgcacttgggggcacagtgaccctgcagctgggctaccctccagcccgccctgttgtctcctgccaagcagccgactatgagaacttctcttgcacttggagtcccagccagatcagcggtttacccacccgctacctcacctcctacaggaagaagacagtcctaggagctgatagccagaggaggagtccatccacagggccctggccatgcccacaggatcccctaggggctgcccgctgtgttgtccacggggctgagttctggagccagtaccggattaatgtgactgaggtgaacccactgggtgccagcacacgcctgctggatgtgagcttgcagagcatcttgcgccctgacccaccccagggcctgcgggtagagtcagtaccaggttacccccgacgcctgcgagccagctggacataccctgcctcctggccgtgccagccccacttcctgctcaagttccgtttgcagtaccgtccggcgcagcatccagcctggtccacggtggagccagctggactggaggaggtgatcacagatgctgtggctgggctgccccatgctgtacgagtcagtgcccgggactttctagatgctggcacctggagcacctggagcccggaggcctggggaactccgagcactgggaccataccaaaggagataccagcatggggccagctacacacgcagccagaggtggagcctcaggtggacagccctgctcctccaaggccctccctccaaccacaccctcggctacttgatcacagggactctgtggagcaggtagctgtgctggcgtctttgggaatcctttctttcctgggactggtggctggggccctggcactggggctctggtaa

SEQ ID NO: 40 - DNA, 1143 bp, Homo sapiens
atggctttcgtttgcttggctatcggatgcttatatacctttctgataagcacaacatttggctgtacttcatcttcagacaccgagataaaagttaaccctcctcaggattttgagatagtggatcccggatacttaggttatctctatttgcaatggcaacccccactgtctctggatcattttaaggaatgcacagtggaatatgaactaaaataccgaaacattggtagtgaaacatggaagaccatcattactaagaatctacattacaaagatgggtttgatcttaacaagggcattgaagcgaagatacacacgcttttaccatggcaatgcacaaatggatcagaagttcaaagttcctgggcagaaactacttattggatatcaccacaaggaattccagaaactaaagttcaggatatggattgcgtatattacaattggcaatatttactctgttcttggaaacctggcataggtgtacttcttgataccaattacaacttgttttactggtatgagggcttggatcatgcattacagtgtgttgattacatcaaggctgatggacaaaatataggatgcagatttccctatttggaggcatcagactataaagatttctatatttgtgttaatggatcatcagagaacaagcctatcagatccagttatttcacttttcagcttcaaaatatagttaaacctttgccgccagtctatcttacttttactcgggagagttcatgtgaaattaagctgaaatggagcatacctttgggacctattccagcaaggtgttttgattatgaaattgagatcagagaagatgatactaccttggtgactgctacagttgaaaatgaaacatacaccttgaaaacaacaaatgaaacccgacaattatgctttgtagtaagaagcaaagtgaatatttattgctcagatgacggaatttggagtgagtggagtgataaacaatgctgggaaggtgaagacctatcgaagaaaactttgctacgtttctggctaccatttggtttcatcttaatattagttatatttgtaaccggtctgcttttgcgtaagccaaacacctacccaaaaatgattccagaatttttctgtgatacatga

SEQ ID NO: 41 - DNA, 1197 bp, Homo sapiens
atgttgcgcttgtacgtgttggtaatgggagtttctgccttcacccttcagcctgcggcacacacaggggctgccagaagctgccggtttcgtgggaggcattacaagcgggagttcaggctggaaggggagcctgtagccctgaggtgcccccaggtgccctactggttgtgggcctctgtcagcccccgcatcaacctgacatggcataaaaatgactctgctaggacggtcccaggagaagaagagacacggatgtgggcccaggacggtgctctgtggcttctgccagccttgcaggaggactctggcacctacgtctgcactactagaaatgcttcttactgtgacaaaatgtccattgagctcagagtttttgagaatacagatgctttcctgccgttcatctcatacccgcaaattttaaccttgtcaacctctggggtattagtatgccctgacctgagtgaattcacccgtgacaaaactgacgtgaagattcaatggtacaaggattctcttcttttggataaagacaatgagaaatttctaagtgtgagggggaccactcacttactcgtacacgatgtggccctggaagatgctggctattaccgctgtgtcctgacatttgcccatgaaggccagcaatacaacatcactaggagtattgagctacgcatcaagaaaaaaaaagaagagaccattcctgtgatcatttcccccctcaagaccatatcagcttctctggggtcaagactgacaatcccgtgtaaggtgtttctgggaaccggcacacccttaaccaccatgctgtggtggacggccaatgacacccacatagagagcgcctacccgggaggccgcgtgaccgaggggccacgccaggaatattcagaaaataatgagaactacattgaagtgccattgatttttgatcctgtcacaagagaggatttgcacatggattttaaatgtgttgtccataataccctgagttttcagacactacgcaccacagtcaaggaagcctcctccacgttctcctggggcattgtgctggccccactttcactggccttcttggttttggggggaatatggatgcacagacggtgcaaacacagaactggaaaagcagatggtctgactgtgctatggcctcatcatcaagactttcaatcctatcccaagtga

SEQ ID NO: 42 - DNA, 1197 bp, Homo sapiens; identical to SEQ ID NO: 41

SEQ ID NO: 43 - DNA, 537 bp, Homo sapiens
atgcacagctcagcactgctctgttgcctggtcctcctgactggggtgagggccagcccaggccagggcacccagtctgagaacagctgcacccacttcccaggcaacctgcctaacatgcttcgagatctccgagatgccttcagcagagtgaagactttctttcaaatgaaggatcagctggacaacttgttgttaaaggagtccttgctggaggactttaagggttacctgggttgccaagccttgtctgagatgatccagttttacctggaggaggtgatgccccaagctgagaaccaagacccagacatcaaggcgcatgtgaactccctgggggagaacctgaagaccctcaggctgaggctacggcgctgtcatcgatttcttccctgtgaaaacaagagcaaggccgtggagcaggtgaagaatgcctttaataagctccaagagaaaggcatctacaaagccatgagtgagtttgacatcttcatcaactacatagaagcctacatgacaatgaagatacgaaactga

SEQ ID NO: 44 - DNA, 570 bp, Homo sapiens
atggcctcgccctttgctttactgatggtcctggtggtgctcagctgcaagtcaagctgctctctgggctgtgatctccctgagacccacagcctggataacaggaggaccttgatgctcctggcacaaatgagcagaatctctccttcctcctgtctgatggacagacatgactttggatttccccaggaggagtttgatggcaaccagttccagaaggctccagccatctctgtcctccatgagctgatccagcagatcttcaacctctttaccacaaaagattcatctgctgcttgggatgaggacctcctagacaaattctgcaccgaactctaccagcagctgaatgacttggaagcctgtgtgatgcaggaggagagggtgggagaaactcccctgatgaatgcggactccatcttggctgtgaagaaatacttccgaagaatcactctctatctgacagagaagaaatacagcccttgtgcctgggaggttgtcagagcagaaatcatgagatccctctctttatcaacaaacttgcaagaaagattaaggaggaaggaataa

SEQ ID NO: 45 - DNA, 726 bp, Homo sapiens
atggcacagcacggggcgatgggcgcgtttcgggccctgtgcggcctggcgctgctgtgcgcgctcagcctgggtcagcgccccaccgggggtcccgggtgcggccctgggcgcctcctgcttgggacgggaacggacgcgcgctgctgccgggttcacacgacgcgctgctgccgcgattacccgggcgaggagtgctgttccgagtgggactgcatgtgtgtccagcctgaattccactgcggagacccttgctgcacgacctgccggcaccacccttgtcccccaggccagggggtacagtcccaggggaaattcagttttggcttccagtgtatcgactgtgcctcggggaccttctccgggggccacgaaggccactgcaaaccttggacagactgcacccagttcgggtttctcactgtgttccctgggaacaagacccacaacgctgtgtgcgtcccagggtccccgccggcagagccgcttgggtggctgaccgtcgtcctcctggccgtggccgcctgcgtcctcctcctgacctcggcccagcttggactgcacatctggcagctgaggagtcagtgcatgtggccccgagagacccagctgctgctggaggtgccgccgtcgaccgaagacgccagaagctgccagttccccgaggaagagcggggcgagcgatcggcagaggagaaggggcggctgggagacctgtgggtgtga

SEQ ID NO: 46 - DNA, 705 bp, Homo sapiens
atggcacagcacggggcgatgggcgcgtttcgggccctgtgcggcctggcgctgctgtgcgcgctcagcctgggtcagcgccccaccgggggtcccgggtgcggccctgggcgcctcctgcttgggacgggaacggacgcgcgctgctgccgggttcacacgacgcgctgctgccgcgattacccgggcgaggagtgctgttccgagtgggactgcatgtgtgtccagcctgaattccactgcggagacccttgctgcacgacctgccggcaccacccttgtcccccaggccagggggtacagtcccaggggaaattcagttttggcttccagtgtatcgactgtgcctcggggaccttctccgggggccacgaaggccactgcaaaccttggacagactgcacccagttcgggtttctcactgtgttccctgggaacaagacccacaacgctgtgtgcgtcccagggtccccgccggcagagccgcttgggtggctgaccgtcgtcctcctggccgtggccgcctgcgtcctcctcctgacctcggcccagcttggactgcacatctggcagctgaggaagacccagctgctgctggaggtgccgccgtcgaccgaagacgccagaagctgccagttccccgaggaagagcggggcgagcgatcggcagaggagaaggggcggctgggagacctgtgggtgtga

SEQ ID NO: 47 - DNA, 1143 bp, Homo sapiens
atgaagaagtccattggaatattaagcccaggagttgctttggggatggctggaagtgcaatgtcttccaagttcttcctagtggctttggccatatttttctccttcgcccaggttgtaattgaagccaattcttggtggtcgctaggtatgaataaccctgttcagatgtcagaagtatatattataggagcacagcctctctgcagccaactggcaggactttctcaaggacagaagaaactgtgccacttgtatcaggaccacatgcagtacatcggagaaggcgcgaagacaggcatcaaagaatgccagtatcaattccgacatcgaaggtggaactgcagcactgtggataacacctctgtttttggcagggtgatgcagataggcagccgcgagacggccttcacatacgcggtgagcgcagcaggggtggtgaacgccatgagccgggcgtgccgcgagggcgagctgtccacctgcggctgcagccgcgccgcgcgccccaaggacctgccgcgggactggctctggggcggctgcggcgacaacatcgactatggctaccgctttgccaaggagttcgtggacgcccgcgagcgggagcgcatccacgccaagggctcctacgagagtgctcgcatcctcatgaacctgcacaacaacgaggccggccgcaggacggtgtacaacctggctgatgtggcctgcaagtgccatggggtgtccggctcatgtagcctgaagacatgctggctgcagctggcagacttccgcaaggtgggtgatgccctgaaggagaagtacgacagcgcggcggccatgcggctcaacagccggggcaagttggtacaggtcaacagccgcttcaactcgcccaccacacaagacctggtctacatcgaccccagccctgactactgcgtgcgcaatgagagcaccggctcgctgggcacgcagggccgcctgtgcaacaagacgtcggagggcatggatggctgcgagctcatgtgctgcggccgtggctacgaccagttcaagaccgtgcagacggagcgctgccactgcaagttccactggtgctgctacgtcaagtgcaagaagtgcacggagatcgtggaccagtttgtgtgcaagtag

SEQ ID NO: 48 - DNA, 1017 bp, Homo sapiens
atgtcggatttcgacagtaacccgtttgccgacccggatctcaacaatcccttcaaggatccatcagttacacaagtgacaagaaatgttccaccaggacttgatgaatataatccattctcggattctagaacacctccaccaggcggtgtgaagatgcctaatgtacccaatacacaaccagcaataatgaaaccaacagaggaacatccagcttatacacagattgcaaaggaacatgcattggcccaagctgaacttcttaagcgccaggaagaactagaaagaaaagccgcagaattagatcgtcgggaacgagaaatgcaaaacctcagtcaacatggtagaaaaaataattggccacctcttcctagcaattttcctgtcggaccttgtttctatcaggatttttctgtagacattcctgtagaattccaaaagacagtaaagcttatgtactacttgtggatgttccatgcagtaacactgtttctaaatatcttcggatgcttggcttggttttgtgttgattctgcaagagcggttgattttggattgagtatcctgtggttcttgctttttactccttgttcatttgtctgttggtacagaccactttatggagctttcaggagtgacagttcatttagattctttgtattcttcttcgtctatatttgtcagtttgctgtacatgtactccaagctgcaggatttcataactggggcaattgtggttggatttcatcccttactggtctcaaccaaaatattcctgttggaatcatgatgataatcatagcagcacttttcacagcatcagcagtcatctcactagttatgttcaaaaaagtacatggactatatcgcacaacaggtgctagttttgagaaggcccaacaggagtttgcaacaggtgtgatgtccaacaaaactgtccagaccgcagctgcaaatgcagcttcaactgcagcatctagtgcagctcagaatgctttcaagggtaaccagatttaa

SEQ ID NO: 49 - DNA, 2565 bp, Homo sapiens
atgcccccgtgttcgggcggggacggctccacccctcctgggccctcccttcgggacagggactgtcccgcccagagtgctgaatacccgcgcgaccgtctggatccccgcccaggaagcccctctgaagcctcctcgccgccgtttctgagaagcagggcacctgttaactggtaccaagaaaaggcccaagtgtttctctggcatctgatggtgtctggatccaccactctactctgtctctggaaacagcccttccacgtctctgcattccctgtcaccgcgtcactggccttcagacagagccaaggtgcagggcaacacctctacaaggatctgcagccatttatattgcttaggctactgatgcctgaggaaacccagacccaagaccaaccgatggaggaggaggaggttgagacgttcgcctttcaggcagaaattgcccagttgatgtcattgatcatcaatactttctactcgaacaaagagatctttctgagagagctcatttcaaattcatcagatgcattggacaaaatccggtatgaaagcttgacagatcccagtaaattagactctgggaaagagctgcatattaaccttataccgaacaaacaagatcgaactctcactattgtggatactggaattggaatgaccaaggctgacttgatcaataaccttggtactatcgccaagtctgggaccaaagcgttcatggaagctttgcaggctggtgcagatatctctatgattggccagttcggtgttggtttttattctgcttatttggttgctgagaaagtaactgtgatcaccaaacataacgatgatgagcagtacgcttgggagtcctcagcagggggatcattcacagtgaggacagacacaggtgaacctatgggtcgtggaacaaaagttatcctacacctgaaagaagaccaaactgagtacttggaggaacgaagaataaaggagattgtgaagaaacattctcagtttattggatatcccattactctttttgtggagaaggaacgtgataaagaagtaagcgatgatgaggctgaagaaaaggaagacaaagaagaagaaaaagaaaaagaagagaaagagtcggaagacaaacctgaaattgaagatgttggttctgatgaggaagaagaaaagaaggatggtgacaagaagaagaagaagaagattaaggaaaagtacatcgatcaagaagagctcaacaaaacaaagcccatctggaccagaaatcccgacgatattactaatgaggagtacggagaattctataagagcttgaccaatgactgggaagatcacttggcagtgaagcatttttcagttgaaggacagttggaattcagagcccttctatttgtcccacgacgtgctccttttgatctgtttgaaaacagaaagaaaaagaacaacatcaaattgtatgtacgcagagttttcatcatggataactgtgaggagctaatccctgaatatctgaacttcattagaggggtggtagactcggaggatctccctctaaacatatcccgtgagatgttgcaacaaagcaaaattttgaaagttatcaggaagaatttggtcaaaaaatgcttagaactctttactgaactggcggaagataaagagaactacaagaaattctatgagcagttctctaaaaacataaagcttggaatacacgaagactctcaaaatcggaagaagctttcagagctgttaaggtactacacatctgcctctggtgatgagatggtttctctcaaggactactgcaccagaatgaaggagaaccagaaacatatctattatatcacaggtgagaccaaggaccaggtagctaactcagcctttgtggaacgtcttcggaaacatggcttagaagtgatctatatgattgagcccattgatgagtactgtgtccaacagctgaaggaatttgaggggaagactttagtgtcagtcaccaaagaaggcctggaacttccagaggatgaagaagagaaaaagaagcaggaagagaaaaaaacaaagtttgagaacctctgcaaaatcatgaaagacatattggagaaaaaagttgaaaaggtggttgtgtcaaaccgattggtgacatctccatgctgtattgtcacaagcacatatggctggacagcaaacatggagagaatcatgaaagctcaagccctaagagacaactcaacaatgggttacatggcagcaaagaaacacctggagataaaccctgaccattccattattgagaccttaaggcaaaaggcagaggctgataagaacgacaagtctgtgaaggatctggtcatcttgctttatgaaactgcgctcctgtcttctggcttcagtctggaagatccccagacacatgctaacaggatctacaggatgatcaaacttggtctgggtattgatgaagatgaccctactgctgatgataccagtgctgctgtaactgaagaaatgccaccccttgaaggagatgacgacacatcacgcatggaagaagtagactaa

SEQ ID NO: 50 - DNA, 2199 bp, Homo sapiens
atgcctgaggaaacccagacccaagaccaaccgatggaggaggaggaggttgagacgttcgcctttcaggcagaaattgcccagttgatgtcattgatcatcaatactttctactcgaacaaagagatctttctgagagagctcatttcaaattcatcagatgcattggacaaaatccggtatgaaagcttgacagatcccagtaaattagactctgggaaagagctgcatattaaccttataccgaacaaacaagatcgaactctcactattgtggatactggaattggaatgaccaaggctgacttgatcaataaccttggtactatcgccaagtctgggaccaaagcgttcatggaagctttgcaggctggtgcagatatctctatgattggccagttcggtgttggtttttattctgcttatttggttgctgagaaagtaactgtgatcaccaaacataacgatgatgagcagtacgcttgggagtcctcagcagggggatcattcacagtgaggacagacacaggtgaacctatgggtcgtggaacaaaagttatcctacacctgaaagaagaccaaactgagtacttggaggaacgaagaataaaggagattgtgaagaaacattctcagtttattggatatcccattactctttttgtggagaaggaacgtgataaagaagtaagcgatgatgaggctgaagaaaaggaagacaaagaagaagaaaaagaaaaagaagagaaagagtcggaagacaaacctgaaattgaagatgttggttctgatgaggaagaagaaaagaaggatggtgacaagaagaagaagaagaagattaaggaaaagtacatcgatcaagaagagctcaacaaaacaaagcccatctggaccagaaatcccgacgatattactaatgaggagtacggagaattctataagagcttgaccaatgactgggaagatcacttggcagtgaagcatttttcagttgaaggacagttggaattcagagcccttctatttgtcccacgacgtgctccttttgatctgtttgaaaacagaaagaaaaagaacaacatcaaattgtatgtacgcagagttttcatcatggataactgtgaggagctaatccctgaatatctgaacttcattagaggggtggtagactcggaggatctccctctaaacatatcccgtgagatgttgcaacaaagcaaaattttgaaagttatcaggaagaatttggtcaaaaaatgcttagaactctttactgaactggcggaagataaagagaactacaagaaattctatgagcagttctctaaaaacataaagcttggaatacacgaagactctcaaaatcggaagaagctttcagagctgttaaggtactacacatctgcctctggtgatgagatggtttctctcaaggactactgcaccagaatgaaggagaaccagaaacatatctattatatcacaggtgagaccaaggaccaggtagctaactcagcctttgtggaacgtcttcggaaacatggcttagaagtgatctatatgattgagcccattgatgagtactgtgtccaacagctgaaggaatttgaggggaagactttagtgtcagtcaccaaagaaggcctggaacttccagaggatgaagaagagaaaaagaagcaggaagagaaaaaaacaaagtttgagaacctctgcaaaatcatgaaagacatattggagaaaaaagttgaaaaggtggttgtgtcaaaccgattggtgacatctccatgctgtattgtcacaagcacatatggctggacagcaaacatggagagaatcatgaaagctcaagccctaagagacaactcaacaatgggttacatggcagcaaagaaacacctggagataaaccctgaccattccattattgagaccttaaggcaaaaggcagaggctgataagaacgacaagtctgtgaaggatctggtcatcttgctttatgaaactgcgctcctgtcttctggcttcagtctggaagatccccagacacatgctaacaggatctacaggatgatcaaacttggtctgggtattgatgaagatgaccctactgctgatgataccagtgctgctgtaactgaagaaatgccaccccttgaaggagatgacgacacatcacgcatggaagaagtagactaa

SEQ ID NO: 51 - DNA, 3633 bp, Homo sapiens
atgcgaccctccgggacggccggggcagcgctcctggcgctgctggctgcgctctgcccggcgagtcgggctctggaggaaaagaaagtttgccaaggcacgagtaacaagctcacgcagttgggcacttttgaagatcattttctcagcctccagaggatgttcaataactgtgaggtggtccttgggaatttggaaattacctatgtgcagaggaattatgatctttccttcttaaagaccatccaggaggtggctggttatgtcctcattgccctcaacacagtggagcgaattcctttggaaaacctgcagatcatcagaggaaatatgtactacgaaaattcctatgccttagcagtcttatctaactatgatgcaaataaaaccggactgaaggagctgcccatgagaaatttacaggaaatcctgcatggcgccgtgcggttcagcaacaaccctgccctgtgcaacgtggagagcatccagtggcgggacatagtcagcagtgactttctcagcaacatgtcgatggacttccagaaccacctgggcagctgccaaaagtgtgatccaagctgtcccaatgggagctgctggggtgcaggagaggagaactgccagaaactgaccaaaatcatctgtgcccagcagtgctccgggcgctgccgtggcaagtcccccagtgactgctgccacaaccagtgtgctgcaggctgcacaggcccccgggagagcgactgcctggtctgccgcaaattccgagacgaagccacgtgcaaggacacctgccccccactcatgctctacaaccccaccacgtaccagatggatgtgaaccccgagggcaaatacagctttggtgccacctgcgtgaagaagtgtccccgtaattatgtggtgacagatcacggctcgtgcgtccgagcctgtggggccgacagctatgagatggaggaagacggcgtccgcaagtgtaagaagtgcgaagggccttgccgcaaagtgtgtaacggaataggtattggtgaatttaaagactcactctccataaatgctacgaatattaaacacttcaaaaactgcacctccatcagtggcgatctccacatcctgccggtggcatttaggggtgactccttcacacatactcctcctctggatccacaggaactggatattctgaaaaccgtaaaggaaatcacagggtttttgctgattcaggcttggcctgaaaacaggacggacctccatgcctttgagaacctagaaatcatacgcggcaggaccaagcaacatggtcagttttctcttgcagtcgtcagcctgaacataacatccttgggattacgctccctcaaggagataagtgatggagatgtgataatttcaggaaacaaaaatttgtgctatgcaaatacaataaactggaaaaaactgtttgggacctccggtcagaaaaccaaaattataagcaacagaggtgaaaacagctgcaaggccacaggccaggtctgccatgccttgtgctcccccgagggctgctggggcccggagcccagggactgcgtctcttgccggaatgtcagccgaggcagggaatgcgtggacaagtgcaaccttctggagggtgagccaagggagtttgtggagaactctgagtgcatacagtgccacccagagtgcctgcctcaggccatgaacatcacctgcacaggacggggaccagacaactgtatccagtgtgcccactacattgacggcccccactgcgtcaagacctgcccggcaggagtcatgggagaaaacaacaccctggtctggaagtacgcagacgccggccatgtgtgccacctgtgccatccaaactgcacctacggatgcactgggccaggtcttgaaggctgtccaacgaatgggcctaagatcccgtccatcgccactgggatggtgggggccctcctcttgctgctggtggtggccctggggatcggcctcttcatgcgaaggcgccacatcgttcggaagcgcacgctgcggaggctgctgcaggagagggagcttgtggagcctcttacacccagtggagaagctcccaaccaagctctcttgaggatcttgaaggaaactgaattcaaaaagatcaaagtgctgggctccggtgcgttcggcacggtgtataagggactctggatcccagaaggtgagaaagttaaaattcccgtcgctatcaaggaattaagagaagcaacatctccgaaagccaacaaggaaatcctcgatgaagcctacgtgatggccagcgtggacaacccccacgtgtgccgcctgctgggcatctgcctcacctccaccgtgcagctcatcacgcagctcatgcccttcggctgcctcctggactatgtccgggaacacaaagacaatattggctcccagtacctgctcaactggtgtgtgcagatcgcaaagggcatgaactacttggaggaccgtcgcttggtgcaccgcgacctggcagccaggaacgtactggtgaaaacaccgcagcatgtcaagatcacagattttgggctggccaaactgctgggtgcggaagagaaagaataccatgcagaaggaggcaaagtgcctatcaagtggatggcattggaatcaattttacacagaatctatacccaccagagtgatgtctggagctacggggtgaccgtttgggagttgatgacctttggatccaagccatatgacggaatccctgccagcgagatctcctccatcctggagaaaggagaacgcctccctcagccacccatatgtaccatcgatgtctacatgatcatggtcaagtgctggatgatagacgcagatagtcgcccaaagttccgtgagttgatcatcgaattctccaaaatggcccgagacccccagcgctaccttgtcattcagggggatgaaagaatgcatttgccaagtcctacagactccaacttctaccgtgccctgatggatgaagaagacatggacgacgtggtggatgccgacgagtacctcatcccacagcagggcttcttcagcagcccctccacgtcacggactcccctcctgagctctctgagtgcaaccagcaacaattccaccgtggcttgcattgatagaaatgggctgcaaagctgtcccatcaaggaagacagcttcttgcagcgatacagctcagaccccacaggcgccttgactgaggacagcatagacgacaccttcctcccagtgcctgaatacataaaccagtccgttcccaaaaggcccgctggctctgtgcagaatcctgtctatcacaatcagcctctgaaccccgcgcccagcagagacccacactaccaggacccccacagcactgcagtgggcaaccccgagtatctcaacactgtccagcccacctgtgtcaacagcacattcgacagccctgcccactgggcccagaaaggcagccaccaaattagcctggacaaccctgactaccagcaggacttctttcccaaggaagccaagccaaatggcatctttaagggctccacagctgaaaatgcagaatacctaagggtcgcgccacaaagcagtgaatttattggagcatga

SEQ ID NO: 52 - DNA, 2118 bp, Homo sapiens
atgcgaccctccgggacggccggggcagcgctcctggcgctgctggctgcgctctgcccggcgagtcgggctctggaggaaaagaaagtttgccaaggcacgagtaacaagctcacgcagttgggcacttttgaagatcattttctcagcctccagaggatgttcaataactgtgaggtggtccttgggaatttggaaattacctatgtgcagaggaattatgatctttccttcttaaagaccatccaggaggtggctggttatgtcctcattgccctcaacacagtggagcgaattcctttggaaaacctgcagatcatcagaggaaatatgtactacgaaaattcctatgccttagcagtcttatctaactatgatgcaaataaaaccggactgaaggagctgcccatgagaaatttacaggaaatcctgcatggcgccgtgcggttcagcaacaaccctgccctgtgcaacgtggagagcatccagtggcgggacatagtcagcagtgactttctcagcaacatgtcgatggacttccagaaccacctgggcagctgccaaaagtgtgatccaagctgtcccaatgggagctgctggggtgcaggagaggagaactgccagaaactgaccaaaatcatctgtgcccagcagtgctccgggcgctgccgtggcaagtcccccagtgactgctgccacaaccagtgtgctgcaggctgcacaggcccccgggagagcgactgcctggtctgccgcaaattccgagacgaagccacgtgcaaggacacctgccccccactcatgctctacaaccccaccacgtaccagatggatgtgaaccccgagggcaaatacagctttggtgccacctgcgtgaagaagtgtccccgtaattatgtggtgacagatcacggctcgtgcgtccgagcctgtggggccgacagctatgagatggaggaagacggcgtccgcaagtgtaagaagtgcgaagggccttgccgcaaagtgtgtaacggaataggtattggtgaatttaaagactcactctccataaatgctacgaatattaaacacttcaaaaactgcacctccatcagtggcgatctccacatcctgccggtggcatttaggggtgactccttcacacatactcctcctctggatccacaggaactggatattctgaaaaccgtaaaggaaatcacagggtttttgctgattcaggcttggcctgaaaacaggacggacctccatgcctttgagaacctagaaatcatacgcggcaggaccaagcaacatggtcagttttctcttgcagtcgtcagcctgaacataacatccttgggattacgctccctcaaggagataagtgatggagatgtgataatttcaggaaacaaaaatttgtgctatgcaaatacaataaactggaaaaaactgtttgggacctccggtcagaaaaccaaaattataagcaacagaggtgaaaacagctgcaaggccacaggccaggtctgccatgccttgtgctcccccgagggctgctggggcccggagcccagggactgcgtctcttgccggaatgtcagccgaggcagggaatgcgtggacaagtgcaaccttctggagggtgagccaagggagtttgtggagaactctgagtgcatacagtgccacccagagtgcctgcctcaggccatgaacatcacctgcacaggacggggaccagacaactgtatccagtgtgcccactacattgacggcccccactgcgtcaagacctgcccggcaggagtcatgggagaaaacaacaccctggtctggaagtacgcagacgccggccatgtgtgccacctgtgccatccaaactgcacctacgggccaggaaatgagagtctcaaagccatgttattctgcctttttaaactatcatcctgtaatcaaagtaatgatggcagcgtgtcccaccagagcgggagcccagctgctcaggagtcatgcttaggatggatcccttctcttctgccgtcagagtttcagctgggttggggtggatgcagccacctccatgcctggccttctgcatctgtgatcatcacggcctcctcctgccactga

SEQ ID NO: 53 - DNA, 3114 bp, Homo sapiens
atgcggggctcggggccccggggtgcgggacaccggcggcccccaagcggcggcggcgacacccccatcaccccagcgtccctggccggctgctactctgcacctcgacgggctcccctctggacgtgccttctcctgtgcgccgcactccggaccctcctggccagccccagcaacgaagtgaatttattggattcacgcactgtcatgggggacctgggatggattgcttttccaaaaaatgggtgggaagagattggtgaagtggatgaaaattatgcccctatccacacataccaagtatgcaaagtgatggaacagaatcagaataactggcttttgaccagttggatctccaatgaaggtgcttccagaatcttcatagaactcaaatttaccctgcgggactgcaacagccttcctggaggactggggacctgtaaggaaacctttaatatgtattactttgagtcagatgatcagaatgggagaaacatcaaggaaaaccaatacatcaaaattgataccattgctgccgatgaaagctttacagaacttgatcttggtgaccgtgttatgaaactgaatacagaggtcagagatgtaggacctctaagcaaaaagggattttatcttgcttttcaagatgttggtgcttgcattgctctggtttctgtgcgtgtatactataaaaaatgcccttctgtggtacgacacttggctgtcttccctgacaccatcactggagctgattcttcccaattgctcgaagtgtcaggctcctgtgtcaaccattctgtgaccgatgaacctcccaaaatgcactgcagcgccgaaggggagtggctggtgcccatcgggaaatgcatgtgcaaggcaggatatgaagagaaaaatggcacctgtcaagtgtgcagacctgggttcttcaaagcctcacctcacatccagagctgcggcaaatgtccacctcacagttatacccatgaggaagcttcaacctcttgtgtctgtgaaaaggattatttcaggagagagtctgatccacccacaatggcatgcacaagacccccctctgctcctcggaatgccatctcaaatgttaatgaaactagtgtctttctggaatggattccgcctgctgacactggtggaaggaaagacgtgtcatattatattgcatgcaagaagtgcaactcccatgcaggtgtgtgtgaggagtgtggcggtcatgtcaggtaccttccccggcaaagcggcctgaaaaacacctctgtcatgatggtggatctactcgctcacacaaactatacctttgagattgaggcagtgaatggagtgtccgacttgagcccaggagcccggcagtatgtgtctgtaaatgtaaccacaaatcaagcagctccatctccagtcaccaatgtgaaaaaagggaaaattgcaaaaaacagcatctctttgtcttggcaagaaccagatcgtcccaatggaatcatcctagagtatgaaatcaagtattttgaaaaggaccaagagaccagctacacgattatcaaatctaaagagacaactattactgcagagggcttgaaaccagcttcagtttatgtcttccaaattcgagcacgtacagcagcaggctatggtgtcttcagtcgaagatttgagtttgaaaccaccccagtgtttgcagcatccagcgatcaaagccagattcctgtaattgctgtgtctgtgacagtgggagtcattttgttggcagtggttatcggcgtcctcctcagtggaagttgctgcgaatgtggctgtgggagggcttcttccctgtgcgctgttgcccatccaagcctaatatggcggtgtggctacagcaaagcaaaacaagatccagaagaggaaaagatgcattttcataatgggcacattaaactgccaggagtaagaacttacattgatccacatacctatgaggatcccaatcaagctgtccacgaatttgctaaggagatagaagcatcatgtatcaccattgagagagttattggagcaggtgaatttggtgaagtttgtagtggacgtttgaaactaccaggaaaaagagaattacctgtggctatcaaaacccttaaagtaggctatactgaaaagcaacgcagagatttcctaggtgaagcaagtatcatgggacagtttgatcatcctaacatcatccatttagaaggtgtggtgaccaaaagtaaaccagtgatgatcgtgacagagtatatggagaatggctctttagatacatttttgaagaaaaacgatgggcagttcactgtgattcagcttgttggcatgctgagaggtatctctgcaggaatgaagtacctttctgacatgggctatgtgcatagagatcttgctgccagaaacatcttaatcaacagtaaccttgtgtgcaaagtgtctgactttggactttcccgggtactggaagatgatcccgaggcagcctacaccacaaggggaggaaaaattccaatcagatggactgccccagaagcaatagctttccgaaagtttacttctgccagtgatgtctggagttatggaatagtaatgtgggaagttgtgtcttatggagagagaccctactgggagatgaccaatcaagatgtgattaaagcggtagaggaaggctatcgtctgccaagccccatggattgtcctgctgctctctatcagttaatgctggattgctggcagaaagagcgaaatagcaggcccaagtttgatgaaatagtcaacatgttggacaagctgatacgtaacccaagtagtctgaagacgctggttaatgcatcctgcagagtatctaatttattggcagaacatagcccactaggatctggggcctacagatcagtaggtgaatggctagaggcaatcaagatgggccggtatacagagattttcatggaaaatggatacagttcaatggacgctgtggctcaggtgaccttggaggatttgagacggcttggagtgactcttgtcggtcaccagaagaagatcatgaacagccttcaagaaatgaaggtgcagctggtaaacggaatggtgccattgtaa

SEQ ID NO: 54 - DNA, 3048 bp, Homo sapiens
atgcggggctcggggccccggggtgcgggacaccggcggcccccaagcggcggcggcgacacccccatcaccccagcgtccctggccggctgctactctgcacctcgacgggctcccctctggacgtgccttctcctgtgcgccgcactccggaccctcctggccagccccagcaacgaagtgaatttattggattcacgcactgtcatgggggacctgggatggattgcttttccaaaaaatgggtgggaagagattggtgaagtggatgaaaattatgcccctatccacacataccaagtatgcaaagtgatggaacagaatcagaataactggcttttgaccagttggatctccaatgaaggtgcttccagaatcttcatagaactcaaatttaccctgcgggactgcaacagccttcctggaggactggggacctgtaaggaaacctttaatatgtattactttgagtcagatgatcagaatgggagaaacatcaaggaaaaccaatacatcaaaattgataccattgctgccgatgaaagctttacagaacttgatcttggtgaccgtgttatgaaactgaatacagaggtcagagatgtaggacctctaagcaaaaagggattttatcttgcttttcaagatgttggtgcttgcattgctctggtttctgtgcgtgtatactataaagaatgcccttctgtggtacgacacttggctgtcttccctgacaccatcactggagctgattcttcccaattgctcgaagtgtcaggctcctgtgtcaaccattctgtgaccgatgaacctcccaaaatgcactgcagcgccgaaggggagtggctggtgcccatcgggaaatgcatgtgcaaggcaggatatgaagagaaaaatggcacctgtcaagtgtgcagacctgggttcttcaaagcctcacctcacatccagagctgcggcaaatgtccacctcacagttatacccatgaggaagcttcaacctcttgtgtctgtgaaaaggattatttcaggagagagtctgatccacccacaatggcatgcacaagacccccctctgctcctcggaatgccatctcaaatgttaatgaaactagtgtctttctggaatggattccgcctgctgacactggtggaaggaaagacgtgtcatattatattgcatgcaagaagtgcaactcccatgcaggtgtgtgtgaggagtgtggcggtcatgtcaggtaccttccccggcaaagcggcctgaaaaacacctctgtcatgatggtggatctactcgctcacacaaactatacctttgagattgaggcagtgaatggagtgtccgacttgagcccaggagcccggcagtatgtgtctgtaaatgtaaccacaaatcaagcagctccatctccagtcaccaatgtgaaaaaagggaaaattgcaaaaaacagcatctctttgtcttggcaagaaccagatcgtcccaatggaatcatcctagagtatgaaatcaagtattttgaaaaggaccaagagaccagctacacgattatcaaatctaaagagacaactattactgcagagggcttgaaaccagcttcagtttatgtcttccaaattcgagcacgtacagcagcaggctatggtgtcttcagtcgaagatttgagtttgaaaccaccccagtgtttgcagcatccagcgatcaaagccagattcctgtaattgctgtgtctgtgacagtgggagtcattttgttggcagtggttatcggcgtcctcctcagtggaaggcggtgtggctacagcaaagcaaaacaagatccagaagaggaaaagatgcattttcataatgggcacattaaactgccaggagtaagaacttacattgatccacatacctatgaggatcccaatcaagctgtccacgaatttgctaaggagatagaagcatcatgtatcaccattgagagagttattggagcaggtgaatttggtgaagtttgtagtggacgtttgaaactaccaggaaaaagagaattacctgtggctatcaaaacccttaaagtaggctatactgaaaagcaacgcagagatttcctaggtgaagcaagtatcatgggacagtttgatcatcctaacatcatccatttagaaggtgtggtgaccaaaagtaaaccagtgatgatcgtgacagagtatatggagaatggctctttagatacatttttgaagaaaaacgatgggcagttcactgtgattcagcttgttggcatgctgagaggtatctctgcaggaatgaagtacctttctgacatgggctatgtgcatagagatcttgctgccagaaacatcttaatcaacagtaaccttgtgtgcaaagtgtctgactttggactttcccgggtactggaagatgatcccgaggcagcctacaccacaaggggaggaaaaattccaatcagatggactgccccagaagcaatagctttccgaaagtttacttctgccagtgatgtctggagttatggaatagtaatgtgggaagttgtgtcttatggagagagaccctactgggagatgaccaatcaagatgtgattaaagcggtagaggaaggctatcgtctgccaagccccatggattgtcctgctgctctctatcagttaatgctggattgctggcagaaagagcgaaatagcaggcccaagtttgatgaaatagtcaacatgttggacaagctgatacgtaacccaagtagtctgaagacgctggttaatgcatcctgcagagtatctaatttattggcagaacatagcccactaggatctggggcctacagatcagtaggtgaatggctagaggcaatcaagatgggccggtatacagagattttcatggaaaatggatacagttcaatggacgctgtggctcaggtgaccttggaggatttgagacggcttggagtgactcttgtcggtcaccagaagaagatcatgaacagccttcaagaaatgaaggtgcagctggtaaacggaatggtgccattgtaa

SEQ ID NO: 55 - DNA, 2961 bp, Homo sapiens
atggctctgcggaggctgggggccgcgctgctgctgctgccgctgctcgccgccgtggaagaaacgctaatggactccactacagcgactgctgagctgggctggatggtgcatcctccatcagggtgggaagaggtgagtggctacgatgagaacatgaacacgatccgcacgtaccaggtgtgcaacgtgtttgagtcaagccagaacaactggctacggaccaagtttatccggcgccgtggcgcccaccgcatccacgtggagatgaagttttcggtgcgtgactgcagcagcatccccagcgtgcctggctcctgcaaggagaccttcaacctctattactatgaggctgactttgactcggccaccaagaccttccccaactggatggagaatccatgggtgaaggtggataccattgcagccgacgagagcttctcccaggtggacctgggtggccgcgtcatgaaaatcaacaccgaggtgcggagcttcggacctgtgtcccgcagcggcttctacctggccttccaggactatggcggctgcatgtccctcatcgccgtgcgtgtcttctaccgcaagtgcccccgcatcatccagaatggcgccatcttccaggaaaccctgtcgggggctgagagcacatcgctggtggctgcccggggcagctgcatcgccaatgcggaagaggtggatgtacccatcaagctctactgtaacggggacggcgagtggctggtgcccatcgggcgctgcatgtgcaaagcaggcttcgaggccgttgagaatggcaccgtctgccgaggttgtccatctgggactttcaaggccaaccaaggggatgaggcctgtacccactgtcccatcaacagccggaccacttctgaaggggccaccaactgtgtctgccgcaatggctactacagagcagacctggaccccctggacatgccctgcacaaccatcccctccgcgccccaggctgtgatttccagtgtcaatgagacctccctcatgctggagtggacccctccccgcgactccggaggccgagaggacctcgtctacaacatcatctgcaagagctgtggctcgggccggggtgcctgcacccgctgcggggacaatgtacagtacgcaccacgccagctaggcctgaccgagccacgcatttacatcagtgacctgctggcccacacccagtacaccttcgagatccaggctgtgaacggcgttactgaccagagccccttctcgcctcagttcgcctctgtgaacatcaccaccaaccaggcagctccatcggcagtgtccatcatgcatcaggtgagccgcaccgtggacagcattaccctgtcgtggtcccagccggaccagcccaatggcgtgatcctggactatgagctgcagtactatgagaaggagctcagtgagtacaacgccacagccataaaaagccccaccaacacggtcaccgtgcagggcctcaaagccggcgccatctatgtcttccaggtgcgggcacgcaccgtggcaggctacgggcgctacagcggcaagatgtacttccagaccatgacagaagccgagtaccagacaagcatccaggagaagttgccactcatcatcggctcctcggccgctggcctggtcttcctcattgctgtggttgtcatcgccatcgtgtgtaacagacgggggtttgagcgtgctgactcggagtacacggacaagctgcaacactacaccagtggccacatgaccccaggcatgaagatctacatcgatcctttcacctacgaggaccccaacgaggcagtgcgggagtttgccaaggaaattgacatctcctgtgtcaaaattgagcaggtgatcggagcaggggagtttggcgaggtctgcagtggccacctgaagctgccaggcaagagagagatctttgtggccatcaagacgctcaagtcgggctacacggagaagcagcgccgggacttcctgagcgaagcctccatcatgggccagttcgaccatcccaacgtcatccacctggagggtgtcgtgaccaagagcacacctgtgatgatcatcaccgagttcatggagaatggctccctggactcctttctccggcaaaacgatgggcagttcacagtcatccagctggtgggcatgcttcggggcatcgcagctggcatgaagtacctggcagacatgaactatgttcaccgtgacctggctgcccgcaacatcctcgtcaacagcaacctggtctgcaaggtgtcggactttgggctctcacgctttctagaggacgatacctcagaccccacctacaccagtgccctgggcggaaagatccccatccgctggacagccccggaagccatccagtaccggaagttcacctcggccagtgatgtgtggagctacggcattgtcatgtgggaggtgatgtcctatggggagcggccctactgggacatgaccaaccaggatgtaatcaatgccattgagcaggactatcggctgccaccgcccatggactgcccgagcgccctgcaccaactcatgctggactgttggcagaaggaccgcaaccaccggcccaagttcggccaaattgtcaacacgctagacaagatgatccgcaatcccaacagcctcaaagccatggcgcccctctcctctggcatcaacctgccgctgctggaccgcacgatccccgactacaccagctttaacacggtggacgagtggctggaggccatcaagatggggcagtacaaggagagcttcgccaatgccggcttcacctcctttgacgtcgtgtctcagatgatgatggaggacattctccgggttggggtcactttggctggccaccagaaaaaaatcctgaacagtatccaggtgatgcgggcgcagatgaaccagattcagtctgtggaggtttga

SEQ ID NO: 56 - DNA, 2964 bp, Homo sapiens
atggctctgcggaggctgggggccgcgctgctgctgctgccgctgctcgccgccgtggaagaaacgctaatggactccactacagcgactgctgagctgggctggatggtgcatcctccatcagggtgggaagaggtgagtggctacgatgagaacatgaacacgatccgcacgtaccaggtgtgcaacgtgtttgagtcaagccagaacaactggctacggaccaagtttatccggcgccgtggcgcccaccgcatccacgtggagatgaagttttcggtgcgtgactgcagcagcatccccagcgtgcctggctcctgcaaggagaccttcaacctctattactatgaggctgactttgactcggccaccaagaccttccccaactggatggagaatccatgggtgaaggtggataccattgcagccgacgagagcttctcccaggtggacctgggtggccgcgtcatgaaaatcaacaccgaggtgcggagcttcggacctgtgtcccgcagcggcttctacctggccttccaggactatggcggctgcatgtccctcatcgccgtgcgtgtcttctaccgcaagtgcccccgcatcatccagaatggcgccatcttccaggaaaccctgtcgggggctgagagcacatcgctggtggctgcccggggcagctgcatcgccaatgcggaagaggtggatgtacccatcaagctctactgtaacggggacggcgagtggctggtgcccatcgggcgctgcatgtgcaaagcaggcttcgaggccgttgagaatggcaccgtctgccgaggttgtccatctgggactttcaaggccaaccaaggggatgaggcctgtacccactgtcccatcaacagccggaccacttctgaaggggccaccaactgtgtctgccgcaatggctactacagagcagacctggaccccctggacatgccctgcacaaccatcccctccgcgccccaggctgtgatttccagtgtcaatgagacctccctcatgctggagtggacccctccccgcgactccggaggccgagaggacctcgtctacaacatcatctgcaagagctgtggctcgggccggggtgcctgcacccgctgcggggacaatgtacagtacgcaccacgccagctaggcctgaccgagccacgcatttacatcagtgacctgctggcccacacccagtacaccttcgagatccaggctgtgaacggcgttactgaccagagccccttctcgcctcagttcgcctctgtgaacatcaccaccaaccaggcagctccatcggcagtgtccatcatgcatcaggtgagccgcaccgtggacagcattaccctgtcgtggtcccagccggaccagcccaatggcgtgatcctggactatgagctgcagtactatgagaaggagctcagtgagtacaacgccacagccataaaaagccccaccaacacggtcaccgtgcagggcctcaaagccggcgccatctatgtcttccaggtgcgggcacgcaccgtggcaggctacgggcgctacagcggcaagatgtacttccagaccatgacagaagccgagtaccagacaagcatccaggagaagttgccactcatcatcggctcctcggccgctggcctggtcttcctcattgctgtggttgtcatcgccatcgtgtgtaacagaagacgggggtttgagcgtgctgactcggagtacacggacaagctgcaacactacaccagtggccacatgaccccaggcatgaagatctacatcgatcctttcacctacgaggaccccaacgaggcagtgcgggagtttgccaaggaaattgacatctcctgtgtcaaaattgagcaggtgatcggagcaggggagtttggcgaggtctgcagtggccacctgaagctgccaggcaagagagagatctttgtggccatcaagacgctcaagtcgggctacacggagaagcagcgccgggacttcctgagcgaagcctccatcatgggccagttcgaccatcccaacgtcatccacctggagggtgtcgtgaccaagagcacacctgtgatgatcatcaccgagttcatggagaatggctccctggactcctttctccggcaaaacgatgggcagttcacagtcatccagctggtgggcatgcttcggggcatcgcagctggcatgaagtacctggcagacatgaactatgttcaccgtgacctggctgcccgcaacatcctcgtcaacagcaacctggtctgcaaggtgtcggactttgggctctcacgctttctagaggacgatacctcagaccccacctacaccagtgccctgggcggaaagatccccatccgctggacagccccggaagccatccagtaccggaagttcacctcggccagtgatgtgtggagctacggcattgtcatgtgggaggtgatgtcctatggggagcggccctactgggacatgaccaaccaggatgtaatcaatgccattgagcaggactatcggctgccaccgcccatggactgcccgagcgccctgcaccaactcatgctggactgttggcagaaggaccgcaaccaccggcccaagttcggccaaattgtcaacacgctagacaagatgatccgcaatcccaacagcctcaaagccatggcgcccctctcctctggcatcaacctgccgctgctggaccgcacgatccccgactacaccagctttaacacggtggacgagtggctggaggccatcaagatggggcagtacaaggagagcttcgccaatgccggcttcacctcctttgacgtcgtgtctcagatgatgatggaggacattctccgggttggggtcactttggctggccaccagaaaaaaatcctgaacagtatccaggtgatgcgggcgcagatgaaccagattcagtctgtggaggtttga

SEQ ID NO: 57 - DNA, 2997 bp, Homo sapiens
atggtttttcaaactcggtacccttcatggattattttatgctacatctggctgctccgctttgcacacacaggggaggcgcaggctgcgaaggaagtactactgctggattctaaagcacaacaaacagagttggagtggatttcctctccacccaatgggtgggaagaaattagtggtttggatgagaactataccccgatacgaacataccaggtgtgccaagtcatggagcccaaccaaaacaactggctgcggactaactggatttccaaaggcaatgcacaaaggatttttgtagaattgaaattcaccctgagggattgtaacagtcttcctggagtactgggaacttgcaaggaaacatttaatttgtactattatgaaacagactatgacactggcaggaatataagagaaaacctctatgtaaaaatagacaccattgctgcagatgaaagttttacccaaggtgaccttggtgaaagaaagatgaagcttaacactgaggtgagagagattggacctttgtccaaaaagggattctatcttgcctttcaggatgtaggggcttgcatagctttggtttctgtcaaagtgtactacaagaagtgctggtccattattgagaacttagctatctttccagatacagtgactggttcagaattttcctctttagtcgaggttcgagggacatgtgtcagcagtgcagaggaagaagcggaaaacgcccccaggatgcactgcagtgcagaaggagaatggttagtgcccattggaaaatgtatctgcaaagcaggctaccagcaaaaaggagacacttgtgaaccctgtggccgtgggttctacaagtcttcctctcaagatcttcagtgctctcgttgtccaactcacagtttttctgataaagaaggctcctccagatgtgaatgtgaagatgggtattacagggctccatctgacccaccatacgttgcgtgcacaaggcctccatctgcaccacagaacctcattttcaacatcaaccaaaccacagtaagtttggaatggagtcctcctgcagacaatgggggaagaaacgatgtgacctacagaatattgtgtaagcggtgcagttgggagcagggcgaatgtgttccctgtgggagtaacattggatacatgccccagcagactggattagaggataactatgtcactgtcatggacctgctagcccacgctaattatacttttgaagttgaagctgtaaatggagtttctgacttaagccgatcccagaggctctttgctgctgtcagtatcaccactggtcaagcagctccctcgcaagtgagtggagtaatgaaggagagagtactgcagcggagtgtcgagctttcctggcaggaaccagagcatcccaatggagtcatcacagaatatgaaatcaagtattacgagaaagatcaaagggaacggacctactcaacagtaaaaaccaagtctacttcagcctccattaataatctgaaaccaggaacagtgtatgttttccagattcgggcttttactgctgctggttatggaaattacagtcccagacttgatgttgctacactagaggaagctacaggtaaaatgtttgaagctacagctgtctccagtgaacagaatcctgttattatcattgctgtggttgctgtagctgggaccatcattttggtgttcatggtctttggcttcatcattgggagaaggcactgtggttatagcaaagctgaccaagaaggcgatgaagagctttactttcattttaaatttccaggcaccaaaacctacattgaccctgaaacctatgaggacccaaatagagctgtccatcaattcgccaaggagctagatgcctcctgtattaaaattgagcgtgtgattggtgcaggagaattcggtgaagtctgcagtggccgtttgaaacttccagggaaaagagatgttgcagtagccataaaaaccctgaaagttggttacacagaaaaacaaaggagagactttttgtgtgaagcaagcatcatggggcagtttgaccacccgaatgttgtccatttggaaggggttgttacaagagggaaaccagtcatgatagtaatagagttcatggaaaatggagccctagatgcatttctcaggaaacatgatgggcaatttacagtcattcagttagtaggaatgctgagaggaattgctgctggaatgagatatttggctgatatgggatatgttcacagggaccttgcagctcgcaatattcttgtcaacagcaatctcgtttgtaaagtgtcagattttggcctgtcccgagttatagaggatgatccagaagctgtctatacaactactggtggaaaaattccagtaaggtggacagcacccgaagccatccagtaccggaaattcacatcagccagtgatgtatggagctatggaatagtcatgtgggaagttatgtcttatggagaaagaccttattgggacatgtcaaatcaagatgttataaaagcaatagaagaaggttatcgtttaccagcacccatggactgcccagctggccttcaccagctaatgttggattgttggcaaaaggagcgtgctgaaaggccaaaatttgaacagatagttggaattctagacaaaatgattcgaaacccaaatagtctgaaaactcccctgggaacttgtagtaggccaataagccctcttctggatcaaaacactcctgatttcactaccttttgttcagttggagaatggctacaagctattaagatggaaagatataaagataatttcacggcagctggctacaattcccttgaatcagtagccaggatgactattgaggatgtgatgagtttagggatcacactggttggtcatcaaaagaaaatcatgagcagcattcagactatgagagcacaaatgctacatttacatggaactggcattcaagtgtga

SEQ ID NO: 58 - DNA, 858 bp, Homo sapiens
atgtgggtgaccaaactcctgccagccctgctgctgcagcatgtcctcctgcatctcctcctgctccccatcgccatcccctatgcagagggacaaaggaaaagaagaaatacaattcatgaattcaaaaaatcagcaaagactaccctaatcaaaatagatccagcactgaagataaaaaccaaaaaagtgaatactgcagaccaatgtgctaatagatgtactaggaataaaggacttccattcacttgcaaggcttttgtttttgataaagcaagaaaacaatgcctctggttccccttcaatagcatgtcaagtggagtgaaaaaagaatttggccatgaatttgacctctatgaaaacaaagactacattagaaactgcatcattggtaaaggacgcagctacaagggaacagtatctatcactaagagtggcatcaaatgtcagccctggagttccatgataccacacgaacacagctatcggggtaaagacctacaggaaaactactgtcgaaatcctcgaggggaagaagggggaccctggtgtttcacaagcaatccagaggtacgctacgaagtctgtgacattcctcagtgttcagaagttgaatgcatgacctgcaatggggagagttatcgaggtctcatggatcatacagaatcaggcaagatttgtcagcgctgggatcatcagacaccacaccggcacaaattcttgcctgaaagatatcccgacaagggctttgatgataattattgccgcaatcccgatggccagccgaggccatggtgctatactcttgaccctcacacccgctgggagtactgtgcaattaaaacatgcgagacataa

SEQ ID NO: 59 - DNA, 873 bp, Homo sapiens
atgtgggtgaccaaactcctgccagccctgctgctgcagcatgtcctcctgcatctcctcctgctccccatcgccatcccctatgcagagggacaaaggaaaagaagaaatacaattcatgaattcaaaaaatcagcaaagactaccctaatcaaaatagatccagcactgaagataaaaaccaaaaaagtgaatactgcagaccaatgtgctaatagatgtactaggaataaaggacttccattcacttgcaaggcttttgtttttgataaagcaagaaaacaatgcctctggttccccttcaatagcatgtcaagtggagtgaaaaaagaatttggccatgaatttgacctctatgaaaacaaagactacattagaaactgcatcattggtaaaggacgcagctacaagggaacagtatctatcactaagagtggcatcaaatgtcagccctggagttccatgataccacacgaacacagctttttgccttcgagctatcggggtaaagacctacaggaaaactactgtcgaaatcctcgaggggaagaagggggaccctggtgtttcacaagcaatccagaggtacgctacgaagtctgtgacattcctcagtgttcagaagttgaatgcatgacctgcaatggggagagttatcgaggtctcatggatcatacagaatcaggcaagatttgtcagcgctgggatcatcagacaccacaccggcacaaattcttgcctgaaagatatcccgacaagggctttgatgataattattgccgcaatcccgatggccagccgaggccatggtgctatactcttgaccctcacacccgctgggagtactgtgcaattaaaacatgcgagacataa

SEQ ID NO: 60 - DNA, 1413 bp, Homo sapiens
atggggaagccctggctgcgtgcgctacagctgctgctcctgctgggcgcgtcgtgggcgcgggcgggcgccccgcgctgcacctacaccttcgtgctgcccccgcagaagttcacgggcgctgtgtgctggagcggccccgcatccacgcgggcgacgcccgaggccgccaacgccagcgagctggcggcgctgcgcatgcgcgtcggccgccacgaggagctgttacgcgagctgcagaggctggcggcggccgacggcgccgtggccggcgaggtgcgcgcgctgcgcaaggagagccgcggcctgagcgcgcgcctgggccagttgcgcgcgcagctgcagcacgaggcggggcccggggcgggcccgggggcggatctgggggcggagcctgccgcggcgctggcgctgctcggggagcgcgtgctcaacgcgtccgccgaggctcagcgcgcagccgcccggttccaccagctggacgtcaagttccgcgagctggcgcagctcgtcacccagcagagcagtctcatcgcccgcctggagcgcctgtgcccgggaggcgcgggcgggcagcagcaggtcctgccgccacccccactggtgcctgtggttccggtccgtcttgtgggtagcaccagtgacaccagtaggatgctggacccagccccagagccccagagagaccagacccagagacagcaggagcccatggcttctcccatgcctgcaggtcaccctgcggtccccaccaagcctgtgggcccgtggcaggattgtgcagaggcccgccaggcaggccatgaacagagtggagtgtatgaactgcgagtgggccgtcacgtagtgtcagtatggtgtgagcagcaactggagggtggaggctggactgtgatccagcggaggcaagatggttcagtcaacttcttcactacctggcagcactataaggcgggctttgggcggccagacggagaatactggctgggccttgaacccgtgtatcagctgaccagccgtggggaccatgagctgctggttctcctggaggactgggggggccgtggagcacgtgcccactatgatggcttctccctggaacccgagagcgaccactaccgcctgcggcttggccagtaccatggtgatgctggagactctctttcctggcacaatgacaagcccttcagcaccgtggatagggaccgagactcctattctggtaactgtgccctgtaccagcggggaggctggtggtaccatgcctgtgcccactccaacctcaacggtgtgtggcaccacggcggccactaccgaagccgctaccaggatggtgtctactgggctgagtttcgtggtggggcatattctctcaggaaggccgccatgctcattcggcccctgaagctgtga

SEQ ID NO: 61 - DNA, 633 bp, Homo sapiens
atgctccctctcccctcatgctccctccccatcctcctccttttcctcctccccagtgtgccaattgagtcccaacccccaccctcaacattgcccccttttctggcccctgagtgggaccttctctccccccgagtagtcctgtctaggggtgcccctgctgggccccctctgctcttcctgctggaggctggggcctttcgggagtcagcaggtgccccggccaaccgcagccggcgtggggtgagcgaaactgcaccagcgagtcgtcggggtgagctggctgtgtgcgatgcagtcagtggctgggtgacagaccgccggaccgctgtggacttgcgtgggcgcgaggtggaggtgttgggcgaggtgcctgcagctggcggcagtcccctccgccagtacttctttgaaacccgctgcaaggctgataacgctgaggaaggtggcccgggggcaggtggagggggctgccggggagtggacaggaggcactgggtatctgagtgcaaggccaagcagtcctatgtgcgggcattgaccgctgatgcccagggccgtgtgggctggcgatggattcgaattgacactgcctgcgtctgcacactcctcagccggactggccgggcctga

SEQ ID NO: 62 - DNA, 786 bp, Homo sapiens
atgtccaccaccacatgccaagtggtggcgttcctcctgtccatcctggggctggccggctgcatcgcggccaccgggatggacatgtggagcacccaggacctgtacgacaaccccgtcacctccgtgttccagtacgaagggctctggaggagctgcgtgaggcagagttcaggcttcaccgaatgcaggccctatttcaccatcctgggacttccagccatgctgcaggcagtgcgagccctgatgatcgtaggcatcgtcctgggtgccattggcctcctggtatccatctttgccctgaaatgcatccgcattggcagcatggaggactctgccaaagccaacatgacactgacctccgggatcatgttcattgtctcaggtctttgtgcaattgctggagtgtctgtgtttgccaacatgctggtgactaacttctggatgtccacagctaacatgtacaccggcatgggtgggatggtgcagactgttcagaccaggtacacatttggtgcggctctgttcgtgggctgggtcgctggaggcctcacactaattgggggtgtgatgatgtgcatcgcctgccggggcctggcaccagaagaaaccaactacaaagccgtttcttatcatgcctcaggccacagtgttgcctacaagcctggaggcttcaaggccagcactggctttgggtccaacaccaaaaacaagaagatatacgatggaggtgcccgcacagaggacgaggtacaatcttatccttccaagcacgactatgtgtaa

SEQ ID NO: 63 - DNA, 786 bp, Homo sapiens
atggccgtgactgcctgtcagggcttggggttcgtggtttcactgattgggattgcgggcatcattgctgccacctgcatggaccagtggagcacccaagacttgtacaacaaccccgtaacagctgttttcaactaccaggggctgtggcgctcctgtgtccgagagagctctggcttcaccgagtgccggggctacttcaccctgctggggctgccagccatgctgcaggcagtgcgagccctgatgatcgtaggcatcgtcctgggtgccattggcctcctggtatccatctttgccctgaaatgcatccgcattggcagcatggaggactctgccaaagccaacatgacactgacctccgggatcatgttcattgtctcaggtctttgtgcaattgctggagtgtctgtgtttgccaacatgctggtgactaacttctggatgtccacagctaacatgtacaccggcatgggtgggatggtgcagactgttcagaccaggtacacatttggtgcggctctgttcgtgggctgggtcgctggaggcctcacactaattgggggtgtgatgatgtgcatcgcctgccggggcctggcaccagaagaaaccaactacaaagccgtttcttatcatgcctcaggccacagtgttgcctacaagcctggaggcttcaaggccagcactggctttgggtccaacaccaaaaacaagaagatatacgatggaggtgcccgcacagaggacgaggtacaatcttatccttccaagcacgactatgtgtaa

SEQ ID NO: 64 - DNA, 2589 bp, Homo sapiens
atgcggctggcgctgctctgggccctggggctcctgggcgcgggcagccctctgccttcctggccgctcccaaatataggtggcactgaggagcagcaggcagagtcagagaaggccccgagggagcccttggagccccaggtccttcaggacgatctcccaattagcctcaaaaaggtgcttcagaccagtctgcctgagcccctgaggatcaagttggagctggacggtgacagtcatatcctggagctgctacagaatagggagttggtcccaggccgcccaaccctggtgtggtaccagcccgatggcactcgggtggtcagtgagggacacactttggagaactgctgctaccagggaagagtgcggggatatgcaggctcctgggtgtccatctgcacctgctctgggctcagaggcttggtggtcctgaccccagagagaagctataccctggagcaggggcctggggaccttcagggtcctcccattatttcgcgaatccaagatctccacctgccaggccacacctgtgccctgagctggcgggaatctgtacacactcagaagccaccagagcaccccctgggacagcgccacattcgccggaggcgggatgtggtaacagagaccaagactgtggagttggtgattgtggctgatcactcggaggcccagaaataccgggacttccagcacctgctaaaccgcacactggaagtggccctcttgctggacacattcttccggcccctgaatgtacgagtggcactagtgggcctggaggcctggacccagcgtgacctggtggagatcagcccaaacccagctgtcaccctcgaaaacttcctccactggcgcagggcacatttgctgcctcgattgccccatgacagtgcccagctggtgactggtacttcattctctgggcctacggtgggcatggccattcagaactccatctgttctcctgacttctcaggaggtgtgaacatggaccactccaccagcatcctgggagtcgcctcctccatagcccatgagttgggccacagcctgggcctggaccatgatttgcctgggaatagctgcccctgtccaggtccagccccagccaagacctgcatcatggaggcctccacagacttcctaccaggcctgaacttcagcaactgcagccgacgggccctggagaaagccctcctggatggaatgggcagctgcctcttcgaacggctgcctagcctaccccctatggctgctttctgcggaaatatgtttgtggagccgggcgagcagtgtgactgtggcttcctggatgactgcgtcgatccctgctgtgattctttgacctgccagctgaggccaggtgcacagtgtgcatctgacggaccctgttgtcaaaattgccagctgcgcccgtctggctggcagtgtcgtcctaccagaggggattgtgacttgcctgaattctgcccaggagacagctcccagtgtccccctgatgtcagcctaggggatggcgagccctgcgctggcgggcaagctgtgtgcatgcacgggcgttgtgcctcctatgcccagcagtgccagtcactttggggacctggagcccagcccgctgcgccactttgcctccagacagctaatactcggggaaatgcttttgggagctgtgggcgcaaccccagtggcagttatgtgtcctgcacccctagagatgccatttgtgggcagctccagtgccagacaggtaggacccagcctctgctgggctccatccgggatctactctgggagacaatagatgtgaatgggactgagctgaactgcagctgggtgcacctggacctgggcagtgatgtggcccagcccctcctgactctgcctggcacagcctgtggccctggcctggtgtgtatagaccatcgatgccagcgtgtggatctcctgggggcacaggaatgtcgaagcaaatgccatggacatggggtctgtgacagcaacaggcactgctactgtgaggagggctgggcaccccctgactgcaccactcagctcaaagcaaccagctccctgaccacagggctgctcctcagcctcctggtcttattggtcctggtgatgcttggtgccagctactggtaccgtgcccgcctgcaccagcgactctgccagctcaagggacccacctgccagtacagggcagcccaatctggtccctctgaacggccaggacctccgcagagggccctgctggcacgaggcactaaggctagtgctctcagcttcccggcccccccttccaggccgctgccgcctgaccctgtgtccaagagactccaggctgagctggctgaccgacccaatccccctacccgccctctgcccgctgacccggtggtgagaagcccgaagtctcaggggccagccaagcccccacccccaaggaagccactgcctgccgacccccagggccggtgcccatcgggtgacctgcccggcccaggggctggaatcccgcccctagtggtaccctccagaccagcgccaccgcctccgacagtgtcctcgctctacctctga

SEQ ID NO: 65 - DNA, 2592 bp, Homo sapiens
atgcggctggcgctgctctgggccctggggctcctgggcgcgggcagccctctgccttcctggccgctcccaaatataggtggcactgaggagcagcaggcagagtcagagaaggccccgagggagcccttggagccccaggtccttcaggacgatctcccaattagcctcaaaaaggtgcttcagaccagtctgcctgagcccctgaggatcaagttggagctggacggtgacagtcatatcctggagctgctacagaatagggagttggtcccaggccgcccaaccctggtgtggtaccagcccgatggcactcgggtggtcagtgagggacacactttggagaactgctgctaccagggaagagtgcggggatatgcaggctcctgggtgtccatctgcacctgctctgggctcagaggcttggtggtcctgaccccagagagaagctataccctggagcaggggcctggggaccttcagggtcctcccattatttcgcgaatccaagatctccacctgccaggccacacctgtgccctgagctggcgggaatctgtacacactcagaagccaccagagcaccccctgggacagcgccacattcgccggaggcgggatgtggtaacagagaccaagactgtggagttggtgattgtggctgatcactcggaggcccagaaataccgggacttccagcacctgctaaaccgcacactggaagtggccctcttgctggacacattcttccggcccctgaatgtacgagtggcactagtgggcctggaggcctggacccagcgtgacctggtggagatcagcccaaacccagctgtcaccctcgaaaacttcctccactggcgcagggcacatttgctgcctcgattgccccatgacagtgcccagctggtgactggtacttcattctctgggcctacggtgggcatggccattcagaactccatctgttctcctgacttctcaggaggtgtgaacatggaccactccaccagcatcctgggagtcgcctcctccatagcccatgagttgggccacagcctgggcctggaccatgatttgcctgggaatagctgcccctgtccaggtccagccccagccaagacctgcatcatggaggcctccacagacttcctaccaggcctgaacttcagcaactgcagccgacgggccctggagaaagccctcctggatggaatgggcagctgcctcttcgaacggctgcctagcctaccccctatggctgctttctgcggaaatatgtttgtggagccgggcgagcagtgtgactgtggcttcctggatgactgcgtcgatccctgctgtgattctttgacctgccagctgaggccaggtgcacagtgtgcatctgacggaccctgttgtcaaaattgccagctgcgcccgtctggctggcagtgtcgtcctaccagaggggattgtgacttgcctgaattctgcccaggagacagctcccagtgtccccctgatgtcagcctaggggatggcgagccctgcgctggcgggcaagctgtgtgcatgcacgggcgttgtgcctcctatgcccagcagtgccagtcactttggggacctggagcccagcccgctgcgccactttgcctccagacagctaatactcggggaaatgcttttgggagctgtgggcgcaaccccagtggcagttatgtgtcctgcacccctagagatgccatttgtgggcagctccagtgccagacaggtaggacccagcctctgctgggctccatccgggatctactctgggagacaatagatgtgaatgggactgagctgaactgcagctgggtgcacctggacctgggcagtgatgtggcccagcccctcctgactctgcctggcacagcctgtggccctggcctggtgtgtatagaccatcgatgccagcgtgtggatctcctgggggcacaggaatgtcgaagcaaatgccatggacatggggtctgtgacagcaacaggcactgctactgtgaggagggctgggcaccccctgactgcaccactcagctcaaagcaaccagctccctgaccacagggctgctcctcagcctcctggtcttattggtcctggtgatgcttggtgccagctactggtaccgtgcccgcctgcaccagcgactctgccagctcaagggacccacctgccagtacagggcagcccaatctggtccctctgaacggccaggacctccgcagagggccctgctggcacgaggcactaagcaggctagtgctctcagcttcccggcccccccttccaggccgctgccgcctgaccctgtgtccaagagactccaggctgagctggctgaccgacccaatccccctacccgccctctgcccgctgacccggtggtgagaagcccgaagtctcaggggccagccaagcccccacccccaaggaagccactgcctgccgacccccagggccggtgcccatcgggtgacctgcccggcccaggggctggaatcccgcccctagtggtaccctccagaccagcgccaccgcctccgacagtgtcctcgctctacctctga

SEQ ID NO: 66 - DNA, 3687 bp, Homo sapiens
atgaagggggcaagattatttgtccttctttctagtttatggagtgggggcattgggcttaacaacagtaagcattcttggactatacctgaggatgggaactctcagaagactatgccttctgcttcagttcctccaaataaaatacaaagtttgcaaatactgccaaccactcgggtcatgtcggcggagatagctacaactccagaggcaagaacttctgaagacagtcttcttaaatcaacactgcctccctcagaaacaagtgcacctgctgagggtgtgagaaatcaaactctcacatccacagagaaagcagaaggagtggtcaagttacagaatcttaccctcccaaccaacgctagcatcaagttcaatcctggagcagaatcagtggtcctttccaattctacactgaaatttcttcagagctttgccagaaagtcaaatgaacaagcaacttctctaaacacagttggaggcactggaggcattggaggcgttggaggcactggaggcgtgggaaatcgagccccacgggaaacatacctcagccggggtgacagcagttccagccaaagaactgactaccaaaaatcaaatttcgaaacaactagaggaaagaattggtgtgcttatgtacataccaggttatctcccacagtgatattggacaaccaggtcacttatgtcccaggtgggaaaggaccttgtggctggaccggtggatcctgtcctcagagatctcagaagatatccaatcctgtctataggatgcaacataaaattgtcacctcattggattggaggtgctgtcctggatacagtgggccgaaatgtcaactaagagcccaggaacagcaaagtttgatacacaccaaccaggctgaaagtcatacagctgttggcagaggagtagctgagcagcagcagcagcaaggctgtggtgacccagaagtgatgcaaaaaatgactgatcaggtgaactaccaggcaatgaaactgactcttctgcagaagaagattgacaatatttctttgactgtgaatgatgtaaggaacacttactcctccctagaaggaaaagtcagcgaagataaaagcagagaatttcaatctcttctaaaaggtctaaaatccaaaagcattaatgtactgataagagacatagtaagagaacaatttaaaatttttcaaaatgacatgcaagagactgtagcacagctcttcaagactgtatcaagtctatcagaggacctcgaaagcaccaggcaaataattcaaaaagttaatgaatctgtggtttcaatagcagcccagcaaaagtttgttttggtgcaagagaatcggcccactttgactgatatagtggaactaaggaatcacattgtgaatgtaaggcaagaaatgactcttacatgtgagaagcctattaaagaactagaagtaaagcagactcatttagaaggtgctctagaacaggaacactcaagaagcattctgtattatgaatccctcaataaaactctttctaaattgaaggaagtacatgagcagcttttatcaactgaacaggtatcagaccagaagaatgctccagctgctgagtcagttagcaataatgtcactgagtacatgtctactttacatgaaaatataaagaagcagagtttgatgatgctgcaaatgtttgaagatttgcacattcaagaaagcaagattaacaatctcaccgtctctttggagatggagaaagagtctctcagaggtgaatgtgaagacatgttatccaaatgcagaaatgattttaaatttcaacttaaggacacagaagagaatttacatgtgttaaatcaaacattggctgaagttctctttccaatggacaataagatggacaaaatgagtgagcaactaaatgatttgacttatgatatggagatccttcaacccttgcttgagcagggagcatcactcagacagacaatgacatatgaacaaccaaaggaagcaatagtgataaggaaaaagatagaaaatctgactagtgctgtcaatagtctaaattttattatcaaagaacttacaaaaagacacaacttacttagaaatgaagtacagggtcgtgatgatgccttagaaagacgtatcaatgaatatgccttagaaatggaagatggcctcaataagacaatgactattataaataatgctattgatttcattcaagataactatgccctaaaagagactttaagtactattaaggataatagtgagatccatcataaatgtacctccgatatggaaactattttgacatttattcctcagttccaccgtctgaatgattctattcagactttggtcaatgacaatcagagatataactttgttttgcaagtcgccaagacccttgcaggtattcccagagatgagaaactaaatcagtccaacttccaaaagatgtatcaaatgttcaatgaaaccacttcccaagtgagaaaataccagcaaaatatgagtcatttggaagaaaaactactcttaactaccaagatttccaaaaattttgagactcggttgcaagacattgagtctaaagttacccagacgctcataccttattatatttcagttaaaaaaggcagtgtagttacaaatgagagagatcaggctcttcaactgcaagtattaaattccagatttaaggcgttggaagcaaaatctatccatctttcaattaacttcttttcgcttaacaaaactctccacgaagttttaacaatgtgtcacaatgcttctacaagtgtgtcagaactgaatgctaccatccctaagtggataaaacattccctgccagatattcaacttcttcagaaaggtctaacagaatttgtggaaccaataattcaaataaaaactcaagctgccctatctaatttaacttgttgtatagatcgatcgttgcctggtagtctggcaaatgttgtcaagtctcagaagcaagtaaaatcattgccaaagaaaattaacgcacttaagaaaccaacggtaaatcttaccacagtcctgataggccggactcaaagaaacacggacaacataatatatcctgaggagtattcaagctgtagtcggcatccgtgccaaaatgggggcacgtgcataaatggaagaactagctttacctgtgcctgcagacatccttttactggtgacaactgcactatcaagcttgtggaagaaaatgctttagctccagatttttccaaaggatcttacagatatgcacccatggtggcattttttgcatctcatacgtatggaatgactatacctggtcctatcctgtttaataacttggatgtcaattatggagcttcatataccccaagaactggaaaatttagaattccgtatcttggagtatatgttttcaagtacaccatcgagtcatttagtgctcatatttctggatttttagtggttgatggaatagacaagcttgcatttgagtctgaaaatattaacagtgaaatacactgtgatagggttttaactggggatgccttattagaattaaattatgggcaggaagtctggttacgacttgcaaaaggaacaattccagccaagtttccccctgttactacatttagtggctatttattatatcgtacataa

SEQ ID NO: 67 - DNA, 3459 bp, Homo sapiens
atggctctcagagtccttctgttaacagccttgaccttatgtcatgggttcaacttggacactgaaaacgcaatgaccttccaagagaacgcaaggggcttcgggcagagcgtggtccagcttcagggatccagggtggtggttggagccccccaggagatagtggctgccaaccaaaggggcagcctctaccagtgcgactacagcacaggctcatgcgagcccatccgcctgcaggtccccgtggaggccgtgaacatgtccctgggcctgtccctggcagccaccaccagcccccctcagctgctggcctgtggtcccaccgtgcaccagacttgcagtgagaacacgtatgtgaaagggctctgcttcctgtttggatccaacctacggcagcagccccagaagttcccagaggccctccgagggtgtcctcaagaggatagtgacattgccttcttgattgatggctctggtagcatcatcccacatgactttcggcggatgaaggagtttgtctcaactgtgatggagcaattaaaaaagtccaaaaccttgttctctttgatgcagtactctgaagaattccggattcactttaccttcaaagagttccagaacaaccctaacccaagatcactggtgaagccaataacgcagctgcttgggcggacacacacggccacgggcatccgcaaagtggtacgagagctgtttaacatcaccaacggagcccgaaagaatgcctttaagatcctagttgtcatcacggatggagaaaagtttggcgatcccttgggatatgaggatgtcatccctgaggcagacagagagggagtcattcgctacgtcattggggtgggagatgccttccgcagtgagaaatcccgccaagagcttaataccatcgcatccaagccgcctcgtgatcacgtgttccaggtgaataactttgaggctctgaagaccattcagaaccagcttcgggagaagatctttgcgatcgagggtactcagacaggaagtagcagctcctttgagcatgagatgtctcaggaaggcttcagcgctgccatcacctctaatggccccttgctgagcactgtggggagctatgactgggctggtggagtctttctatatacatcaaaggagaaaagcaccttcatcaacatgaccagagtggattcagacatgaatgatgcttacttgggttatgctgccgccatcatcttacggaaccgggtgcaaagcctggttctgggggcacctcgatatcagcacatcggcctggtagcgatgttcaggcagaacactggcatgtgggagtccaacgctaatgtcaagggcacccagatcggcgcctacttcggggcctccctctgctccgtggacgtggacagcaacggcagcaccgacctggtcctcatcggggccccccattactacgagcagacccgagggggccaggtgtccgtgtgccccttgcccagggggagggctcggtggcagtgtgatgctgttctctacggggagcagggccaaccctggggccgctttggggcagccctaacagtgctgggggacgtaaatggggacaagctgacggacgtggccattggggccccaggagaggaggacaaccggggtgctgtttacctgtttcacggaacctcaggatctggcatcagcccctcccatagccagcggatagcaggctccaagctctctcccaggctccagtattttggtcagtcactgagtgggggccaggacctcacaatggatggactggtagacctgactgtaggagcccaggggcacgtgctgctgctcaggtcccagccagtactgagagtcaaggcaatcatggagttcaatcccagggaagtggcaaggaatgtatttgagtgtaatgatcaggtggtgaaaggcaaggaagccggagaggtcagagtctgcctccatgtccagaagagcacacgggatcggctaagagaaggacagatccagagtgttgtgacttatgacctggctctggactccggccgcccacattcccgcgccgtcttcaatgagacaaagaacagcacacgcagacagacacaggtcttggggctgacccagacttgtgagaccctgaaactacagttgccgaattgcatcgaggacccagtgagccccattgtgctgcgcctgaacttctctctggtgggaacgccattgtctgctttcgggaacctccggccagtgctggcggaggatgctcagagactcttcacagccttgtttccctttgagaagaattgtggcaatgacaacatctgccaggatgacctcagcatcaccttcagtttcatgagcctggactgcctcgtggtgggtgggccccgggagttcaacgtgacagtgactgtgagaaatgatggtgaggactcctacaggacacaggtcaccttcttcttcccgcttgacctgtcctaccggaaggtgtccacgctccagaaccagcgctcacagcgatcctggcgcctggcctgtgagtctgcctcctccaccgaagtgtctggggccttgaagagcaccagctgcagcataaaccaccccatcttcccggaaaactcagaggtcacctttaatatcacgtttgatgtagactctaaggcttcccttggaaacaaactgctcctcaaggccaatgtgaccagtgagaacaacatgcccagaaccaacaaaaccgaattccaactggagctgccggtgaaatatgctgtctacatggtggtcaccagccatggggtctccactaaatatctcaacttcacggcctcagagaataccagtcgggtcatgcagcatcaatatcaggtcagcaacctggggcagaggagcctccccatcagcctggtgttcttggtgcccgtccggctgaaccagactgtcatatgggaccgcccccaggtcaccttctccgagaacctctcgagtacgtgccacaccaaggagcgcttgccctctcactccgactttctggctgagcttcggaaggcccccgtggtgaactgctccatcgctgtctgccagagaatccagtgtgacatcccgttctttggcatccaggaagaattcaatgctaccctcaaaggcaacctctcgtttgactggtacatcaagacctcgcataaccacctcctgatcgtgagcacagctgagatcttgtttaacgattccgtgttcaccctgctgccgggacagggggcgtttgtgaggtcccagacggagaccaaagtggagccgttcgaggtccccaaccccctgccgctcatcgtgggcagctctgtcgggggactgctgctcctggccctcatcaccgccgcgctgtacaagctcggcttcttcaagcggcaatacaaggacatgatgagtgaagggggtcccccgggggccgaaccccagtag

SEQ ID NO: 68 - DNA, 1128 bp, Homo sapiens
atggagcgcgcgtcctgcttgttgctgctgctgctgccgctggtgcacgtctctgcgaccacgccagaaccttgtgagctggacgatgaagatttccgctgcgtctgcaacttctccgaacctcagcccgactggtccgaagccttccagtgtgtgtctgcagtagaggtggagatccatgccggcggtctcaacctagagccgtttctaaagcgcgtcgatgcggacgccgacccgcggcagtatgctgacacggtcaaggctctccgcgtgcggcggctcacagtgggagccgcacaggttcctgctcagctactggtaggcgccctgcgtgtgctagcgtactcccgcctcaaggaactgacgctcgaggacctaaagataaccggcaccatgcctccgctgcctctggaagccacaggacttgcactttccagcttgcgcctacgcaacgtgtcgtgggcgacagggcgttcttggctcgccgagctgcagcagtggctcaagccaggcctcaaggtactgagcattgcccaagcacactcgcctgccttttcctgcgaacaggttcgcgccttcccggcccttaccagcctagacctgtctgacaatcctggactgggcgaacgcggactgatggcggctctctgtccccacaagttcccggccatccagaatctagcgctgcgcaacacaggaatggagacgcccacaggcgtgtgcgccgcactggcggcggcaggtgtgcagccccacagcctagacctcagccacaactcgctgcgcgccaccgtaaaccctagcgctccgagatgcatgtggtccagcgccctgaactccctcaatctgtcgttcgctgggctggaacaggtgcctaaaggactgccagccaagctcagagtgctcgatctcagctgcaacagactgaacagggcgccgcagcctgacgagctgcccgaggtggataacctgacactggacgggaatcccttcctggtccctggaactgccctcccccacgagggctcaatgaactccggcgtggtcccagcctgtgcacgttcgaccctgtcggtgggggtgtcgggaaccctggtgctgctccaaggggcccggggctttgcctaa

SEQ ID NO: 69 - DNA, 1128 bp, Homo sapiens; identical to SEQ ID NO: 68

SEQ ID NO: 70 - DNA, 2310 bp, Homo sapiens
atgctgtgccggtgctccccgctgctcctcctggtgggcctgctcaccctccggtccgccctctcccaggagtgtgccaagtacaaggtcagcacctgccgggactgcattgagtcgggacccggctgtgcctggtgccagaagctgaacttctctgggcaaggggagcccgactccgtccgctgtgacacgcgggagcagctgcttgcaaagggctgtgtcgcggatgacatcgtggatcccaggagcctggccgagacccaggaggaccaggcagggggccagaagcagctgtccccacagaaagtgacactctacctgagaccaggtcaggcggccacgttcaacgtgaccttccggcgcgccaagggctaccccatcgacctgtactacctgatggacctgtcctactccatgctcgacgacctcatcaacgtgaagaagctggggggcgacctgctcagggctctcaacgagatcaccgagtctggccgcatcggctttgggtctttcgtggacaagacggtgcttcccttcgtcaacacgcaccccgagaagctgcggaacccctgccccaacaaagagaaggagtgccaggccccgttcgccttccgacacgtgctcaagctcacggacaactccaaccagttccagacggaggtcgggaagcagctgatctcggggaacctggacgcccccgagggcgggctggatgccatgatgcaggtggccgcgtgcccggaggagatcggctggcgcaacgtcaccaggctgctggtgttcgccacggacgatggcttccactttgcgggcgacgggaagctgggcgccatcctgacccccaatgacggccgctgccacctggaagacaacttatacaaaagcagcaatgaattcgactacccatcagtgggacagctggcacacaaactggccgaaagcaacatccagcccatctttgccgtgaccaagaaaatggtgaaaacgtatgagaagctcacagacatcatccccaagtccgccgtcggggagctgtcggaggattccagcaacgtcctggagctcattaagaacgcctacaataaactgtcctccagagtgtttttggatcacaacgccctccctgacaccctgaaggtcacgtacgactccttctgcagcaacggggtgtcgcaggtgaaccagcccagaggggactgcgacggcgtccagatcaacgtcccgatcaccttccaggtgaaggtcaccgcctccgagtgcatccaggagcagtcgttcgtcatccgggcgctgggcttcaccgacacggtgaccgtgcgggtgctcccccagtgtgagtgccgctgcggggacagcagcaaggagcgcacgctctgcggcaacaagggctccatggagtgcggggtctgcaggtgcgatgccggctacatcgggaagcactgcgagtgccagacgcagggccggagcagccaggagctggaaggaagctgccgcaaggacaacagctccatcatctgctcggggctgggcgactgcatctgcgggcagtgcgtgtgccacacgagcgacgtgcccaacaagaagatttacggccagttctgcgagtgtgacaacatgaactgcgagcgcttcgatggccaagtctgcgggggcgagaagcggggcctctgcttctgcagcacctgcaggtgccaagaaggtttcgagggctcggcgtgccagtgcctcaagtccacgcagggctgcctcaacctgcagggcgtcgagtgcagcggccgcggccggtgccgctgcaacgtgtgccagtgtgactttggctaccagccgcccctgtgcaccgactgccccagctgccaggtgccctgcgcccgctacgccaaatgcgccgagtgcctgaagttcgacaccggccccttcgccaaaaactgcagcgcggagtgcgggaccactaagctgctgcccagccggatgtcgggccgcaagtgcaatgagcgggactccgagggctgctggatgacctacttcctggtgcagcgcgacggccgggacaactacgacctgcacgtggaggagacgcgcgagtgtgtgaaaggccccaacatcgccgccatcgtggggggcaccgtggggggagtcgtgctcgtgggcatcttcctgctggtcatctggaaggtcctgacccacctgagtgacctcagggagtacaagcgcttcgagaaggagaagctcaagtcccagtggaacaacgataacccccttttcaagagcgccaccacgacagttatgaaccccaagtttgctgagcgctag

SEQ ID NO: 71 - DNA, 2370 bp, Homo sapiens
atgaatttacaaccaattttctggattggactgatcagttcagtttgctgtgtgtttgctcaaacagatgaaaatagatgtttaaaagcaaatgccaaatcatgtggagaatgtatacaagcagggccaaattgtgggtggtgcacaaattcaacatttttacaggaaggaatgcctacttctgcacgatgtgatgatttagaagccttaaaaaagaagggttgccctccagatgacatagaaaatcccagaggctccaaagatataaagaaaaataaaaatgtaaccaaccgtagcaaaggaacagcagagaagctcaagccagaggatattactcagatccaaccacagcagttggttttgcgattaagatcaggggagccacagacatttacattaaaattcaagagagctgaagactatcccattgacctctactaccttatggacctgtcttactcaatgaaagacgatttggagaatgtaaaaagtcttggaacagatctgatgaatgaaatgaggaggattacttcggacttcagaattggatttggctcatttgtggaaaagactgtgatgccttacattagcacaacaccagctaagctcaggaacccttgcacaagtgaacagaactgcaccagcccatttagctacaaaaatgtgctcagtcttactaataaaggagaagtatttaatgaacttgttggaaaacagcgcatatctggaaatttggattctccagaaggtggtttcgatgccatcatgcaagttgcagtttgtggatcactgattggctggaggaatgttacacggctgctggtgttttccacagatgccgggtttcactttgctggagatgggaaacttggtggcattgttttaccaaatgatggacaatgtcacctggaaaataatatgtacacaatgagccattattatgattatccttctattgctcaccttgtccagaaactgagtgaaaataatattcagacaatttttgcagttactgaagaatttcagcctgtttacaaggagctgaaaaacttgatccctaagtcagcagtaggaacattatctgcaaattctagcaatgtaattcagttgatcattgatgcatacaattccctttcctcagaagtcattttggaaaacggcaaattgtcagaaggcgtaacaataagttacaaatcttactgcaagaacggggtgaatggaacaggggaaaatggaagaaaatgttccaatatttccattggagatgaggttcaatttgaaattagcataacttcaaataagtgtccaaaaaaggattctgacagctttaaaattaggcctctgggctttacggaggaagtagaggttattcttcagtacatctgtgaatgtgaatgccaaagcgaaggcatccctgaaagtcccaagtgtcatgaaggaaatgggacatttgagtgtggcgcgtgcaggtgcaatgaagggcgtgttggtagacattgtgaatgcagcacagatgaagttaacagtgaagacatggatgcttactgcaggaaagaaaacagttcagaaatctgcagtaacaatggagagtgcgtctgcggacagtgtgtttgtaggaagagggataatacaaatgaaatttattctggcaaattctgcgagtgtgataatttcaactgtgatagatccaatggcttaatttgtggaggaaatggtgtttgcaagtgtcgtgtgtgtgagtgcaaccccaactacactggcagtgcatgtgactgttctttggatactagtacttgtgaagccagcaacggacagatctgcaatggccggggcatctgcgagtgtggtgtctgtaagtgtacagatccgaagtttcaagggcaaacgtgtgagatgtgtcagacctgccttggtgtctgtgctgagcataaagaatgtgttcagtgcagagccttcaataaaggagaaaagaaagacacatgcacacaggaatgttcctattttaacattaccaaggtagaaagtcgggacaaattaccccagccggtccaacctgatcctgtgtcccattgtaaggagaaggatgttgacgactgttggttctattttacgtattcagtgaatgggaacaacgaggtcatggttcatgttgtggagaatccagagtgtcccactggtccagacatcattccaattgtagctggtgtggttgctggaattgttcttattggccttgcattactgctgatatggaagcttttaatgataattcatgacagaagggagtttgctaaatttgaaaaggagaaaatgaatgccaaatgggacacggtaagttacaaaacatccaaaaagcaaagtggcttataa

SEQ ID NO: 72 - DNA, 2478 bp, Homo sapiens
atgaatttacaaccaattttctggattggactgatcagttcagtttgctgtgtgtttgctcaaacagatgaaaatagatgtttaaaagcaaatgccaaatcatgtggagaatgtatacaagcagggccaaattgtgggtggtgcacaaattcaacatttttacaggaaggaatgcctacttctgcacgatgtgatgatttagaagccttaaaaaagaagggttgccctccagatgacatagaaaatcccagaggctccaaagatataaagaaaaataaaaatgtaaccaaccgtagcaaaggaacagcagagaagctcaagccagaggatattactcagatccaaccacagcagttggttttgcgattaagatcaggggagccacagacatttacattaaaattcaagagagctgaagactatcccattgacctctactaccttatggacctgtcttactcaatgaaagacgatttggagaatgtaaaaagtcttggaacagatctgatgaatgaaatgaggaggattacttcggacttcagaattggatttggctcatttgtggaaaagactgtgatgccttacattagcacaacaccagctaagctcaggaacccttgcacaagtgaacagaactgcaccagcccatttagctacaaaaatgtgctcagtcttactaataaaggagaagtatttaatgaacttgttggaaaacagcgcatatctggaaatttggattctccagaaggtggtttcgatgccatcatgcaagttgcagtttgtggatcactgattggctggaggaatgttacacggctgctggtgttttccacagatgccgggtttcactttgctggagatgggaaacttggtggcattgttttaccaaatgatggacaatgtcacctggaaaataatatgtacacaatgagccattattatgattatccttctattgctcaccttgtccagaaactgagtgaaaataatattcagacaatttttgcagttactgaagaatttcagcctgtttacaaggagctgaaaaacttgatccctaagtcagcagtaggaacattatctgcaaattctagcaatgtaattcagttgatcattgatgcatacaattccctttcctcagaagtcattttggaaaacggcaaattgtcagaaggcgtaacaataagttacaaatcttactgcaagaacggggtgaatggaacaggggaaaatggaagaaaatgttccaatatttccattggagatgaggttcaatttgaaattagcataacttcaaataagtgtccaaaaaaggattctgacagctttaaaattaggcctctgggctttacggaggaagtagaggttattcttcagtacatctgtgaatgtgaatgccaaagcgaaggcatccctgaaagtcccaagtgtcatgaaggaaatgggacatttgagtgtggcgcgtgcaggtgcaatgaagggcgtgttggtagacattgtgaatgcagcacagatgaagttaacagtgaagacatggatgcttactgcaggaaagaaaacagttcagaaatctgcagtaacaatggagagtgcgtctgcggacagtgtgtttgtaggaagagggataatacaaatgaaatttattctggcaaattctgcgagtgtgataatttcaactgtgatagatccaatggcttaatttgtggaggaaatggtgtttgcaagtgtcgtgtgtgtgagtgcaaccccaactacactggcagtgcatgtgactgttctttggatactagtacttgtgaagccagcaacggacagatctgcaatggccggggcatctgcgagtgtggtgtctgtaagtgtacagatccgaagtttcaagggcaaacgtgtgagatgtgtcagacctgccttggtgtctgtgctgagcataaagaatgtgttcagtgcagagccttcaataaaggagaaaagaaagacacatgcacacaggaatgttcctattttaacattaccaaggtagaaagtcgggacaaattaccccagccggtccaacctgatcctgtgtcccattgtaaggagaaggatgttgacgactgttggttctattttacgtattcagtgaatgggaacaacgaggtcatggttcatgttgtggagaatccagagtgtcccactggtccagacatcattccaattgtagctggtgtggttgctggaattgttcttattggccttgcattactgctgatatggaagcttttaatgataattcatgacagaagggagtttgctaaatttgaaaaggagaaaatgaatgccaaatgggacacgtctctctctgtcgcccagcctggagtgcagtggtgtgatatcagctcactgcaacctctgacttccagattccagcaattctcctgcctcagcctcccgagtacctgggattacagggtgaaaatcctatttataagagtgccgtaa

SEQ ID NO: 73 - DNA, 1368 bp, Homo sapiens
atgggcctctccaccgtgcctgacctgctgctgccactggtgctcctggagctgttggtgggaatatacccctcaggggttattggactggtccctcacctaggggacagggagaagagagatagtgtgtgtccccaaggaaaatatatccaccctcaaaataattcgatttgctgtaccaagtgccacaaaggaacctacttgtacaatgactgtccaggcccggggcaggatacggactgcagggagtgtgagagcggctccttcaccgcttcagaaaaccacctcagacactgcctcagctgctccaaatgccgaaaggaaatgggtcaggtggagatctcttcttgcacagtggaccgggacaccgtgtgtggctgcaggaagaaccagtaccggcattattggagtgaaaaccttttccagtgcttcaattgcagcctctgcctcaatgggaccgtgcacctctcctgccaggagaaacagaacaccgtgtgcacctgccatgcaggtttctttctaagagaaaacgagtgtgtctcctgtagtaactgtaagaaaagcctggagtgcacgaagttgtgcctaccccagattgagaatgttaagggcactgaggactcaggcaccacagtgctgttgcccctggtcattttctttggtctttgccttttatccctcctcttcattggtttaatgtatcgctaccaacggtggaagtccaagctctactccattgtttgtgggaaatcgacacctgaaaaagagggggagcttgaaggaactactactaagcccctggccccaaacccaagcttcagtcccactccaggcttcacccccaccctgggcttcagtcccgtgcccagttccaccttcacctccagctccacctatacccccggtgactgtcccaactttgcggctccccgcagagaggtggcaccaccctatcagggggctgaccccatccttgcgacagccctcgcctccgaccccatccccaacccccttcagaagtgggaggacagcgcccacaagccacagagcctagacactgatgaccccgcgacgctgtacgccgtggtggagaacgtgcccccgttgcgctggaaggaattcgtgcggcgcctagggctgagcgaccacgagatcgatcggctggagctgcagaacgggcgctgcctgcgcgaggcgcaatacagcatgctggcgacctggaggcggcgcacgccgcggcgcgaggccacgctggagctgctgggacgcgtgctccgcgacatggacctgctgggctgcctggaggacatcgaggaggcgctttgcggccccgccgccctcccgcccgcgcccagtcttctcagatga

SEQ ID NO: 74 - DNA, 1386 bp, Homo sapiens
atggcgcccgtcgccgtctgggccgcgctggccgtcggactggagctctgggctgcggcgcacgccttgcccgcccaggtggcatttacaccctacgccccggagcccgggagcacatgccggctcagagaatactatgaccagacagctcagatgtgctgcagcaaatgctcgccgggccaacatgcaaaagtcttctgtaccaagacctcggacaccgtgtgtgactcctgtgaggacagcacatacacccagctctggaactgggttcccgagtgcttgagctgtggctcccgctgtagctctgaccaggtggaaactcaagcctgcactcgggaacagaaccgcatctgcacctgcaggcccggctggtactgcgcgctgagcaagcaggaggggtgccggctgtgcgcgccgctgcgcaagtgccgcccgggcttcggcgtggccagaccaggaactgaaacatcagacgtggtgtgcaagccctgtgccccggggacgttctccaacacgacttcatccacggatatttgcaggccccaccagatctgtaacgtggtggccatccctgggaatgcaagcatggatgcagtctgcacgtccacgtcccccacccggagtatggccccaggggcagtacacttaccccagccagtgtccacacgatcccaacacacgcagccaactccagaacccagcactgctccaagcacctccttcctgctcccaatgggccccagccccccagctgaagggagcactggcgacttcgctcttccagttggactgattgtgggtgtgacagccttgggtctactaataataggagtggtgaactgtgtcatcatgacccaggtgaaaaagaagcccttgtgcctgcagagagaagccaaggtgcctcacttgcctgccgataaggcccggggtacacagggccccgagcagcagcacctgctgatcacagcgccgagctccagcagcagctccctggagagctcggccagtgcgttggacagaagggcgcccactcggaaccagccacaggcaccaggcgtggaggccagtggggccggggaggcccgggccagcaccgggagctcagattcttcccctggtggccatgggacccaggtcaatgtcacctgcatcgtgaacgtctgtagcagctctgaccacagctcacagtgctcctcccaagccagctccacaatgggagacacagattccagcccctcggagtccccgaaggacgagcaggtccccttctccaaggaggaatgtgcctttcggtcacagctggagacgccagagaccctgctggggagcaccgaagagaagcccctgccccttggagtgcctgatgctgggatgaagcccagttaa

SEQ ID NO: 75 - DNA, 1209 bp, Homo sapiens
atgagcccttgcgggcccctcaacctgagcctggcgggcgaggcgaccacatgcgcggcgccctgggtccccaacacgtcggccgtgccgccgtcgggcgcttcgcccgcgctgcccatcttctccatgacgctgggcgccgtgtccaacctgctggcgctggcgctgctggcgcaggccgcgggccgcctgcgacgccgccgctcggccgccaccttcctgctgttcgtggccagcctgctggccaccgacctggcgggccacgtgatcccgggcgcgctggtgctgcgtctgtacactgcggggcgcgctccggccggcggggcctgccacttcctgggcggctgcatggtcttcttcggcctgtgcccgctgctgctgggctgtggcatggccgtggagcgctgcgtgggcgtcacgcggccgctgctccacgccgcgcgggtctcggtcgcccgcgcgcgcctggcgctggccgcggtggccgcggtggccttggccgtggcgctgctgccgctggcgcgcgtgggccgctatgagctgcagtacccgggcacgtggtgcttcatcggcctgggtcccccgggcggctggcgccaggcactgcttgctggcctcttcgccagcctcggcctggtcgcgctcctcgccgcgctggtgtgcaacacgctcagcggcctggccctgctacgcgcccgctggcgacgccgctcccgacggcctcccccggcctcaggccccgacagccggcgtcgctggggggcgcacggaccccgctcggcctccgcctcgtccgcctcgtccatcgcttcggcctccaccttctttggcggctctcggagcagcggctcggcacgcagagctcgcgcccacgacgtggagatggtgggccagcttgtcggtatcatggtggtgtcgtgcatctgctggagcccaatgctggtgttggtggcgctggccgtcggcggctggagctctacctccctgcagcggccactgttcctggccgtgcgccttgcctcctggaaccagatcctggacccttgggtgtacatcctactgcgccaggccgtgctgcgccaactgcttcgcctcttgcccccgagggccggagccaagggcggccccgcggggctgggcctaacaccgagcgcctgggaggccagctcgctgcgcagctcccggcacagcggcctcagccacttctaa

SEQ ID NO: 76 - DNA, 1896 bp, Homo sapiens
atggcaatgcgggagctggtggaggccgaatgcgggggtgccaacccgctcatgaagctcgccgggcacttcacccaggacaaggcccttcggcaggagggattgaggcctggcccctggccccccggagccccggcctctgaggcagcctccaagcctttgggagtagcttctgaagatgagttggtggctgaattcctgcaggaccagaatgcaccccttgtgtcccgtgcccctcagaccttcaagatggatgacctcctggctgagatgcagcagattgagcagtcaaacttccgccaggctccccagagagcccctggtgtggcagacttggccttgtctgagaactgggcccaggagtttcttgcagctggagatgctgtggatgtaactcaggattataatgagactgactggtcccaagaattcatctctgaagttacagaccccttgtctgtgtcccctgcccgctgggctgaggaatatttggagcaatcagaggagaagctgtggctgggagaacctgagggaacagccaccgatcgctggtatgatgaatatcatcctgaggaggatctgcagcacacggccagtgactttgtggccaaagtggatgaccccaaattggctaattctgagttcctgaaattcgtgcggcagattggcgaagggcaggtgtccctggagtccggtgcagggtcgggccgagctcaggcagaacagtgggcagcagagtttatacagcagcagggtacatcagatgcctgggttgaccagttcacaagaccagtaaacacatctgcccttgatatggagtttgaacgagccaagtcagctatagagttgcaggcagagttggaggagatggcaaaacgggatgctgaggcccacccctggctttctgactatgatgaccttacgtcagctacctatgataaggggtaccagtttgaggaggagaaccccttgcgtgatcaccctcagccttttgaagaagggctgcggcgccttcaggagggggacctgccaaatgctgtgctgctttttgaggcagctgtgcagcaggatcctaagcacatggaagcttggcagtatctgggtaccacccaggcagagaatgaacaagaactattagccatcagtgcattgcggaggtgtctggagctaaagccagataaccagacagcactgatggcgctggctgtgagcttcaccaacgagtccctgcagcgacaggcctgtgaaaccctacgagactggctgcggtacacaccagcctatgcccatctggtgacacctgctgaagaaggggctggtggggcaggactgggccccagcaagcgtatcctgggatctctcttgtctgactccctgtttcttgaagtgaaagagctcttcctggcagctgtgcggctggaccctacctccattgaccctgatgtgcagtgtggcttgggagtccttttcaacctgagtggggagtatgacaaggccgtggactgcttcacagctgccctcagcgttcgtcccaatgactatttgctgtggaataagctaggcgccaccctggccaatggaaaccagagtgaagaagcagtagctgcgtaccgccgggccctcgagctccagcctggctatatccggtcccgctataacctgggcatcagctgcatcaacctcggggctcaccgggaggctgtggagcactttctggaggccctgaacatgcagaggaaaagccggggcccccggggtgaaggaggtgccatgtcggagaacatctggagcaccctgcgtttggcattgtctatgttaggccagagcgatgcctatggggcagccgacgcgcgggatctgtccaccctcctaactatgtttggcctgccccagtga

SEQ ID NO: 77 - DNA, 1095 bp, Homo sapiens
atgccgctgctgctactgctgcccctgctgtgggcaggggccctggctatggatccaaatttctggctgcaagtgcaggagtcagtgacggtacaggagggtttgtgcgtcctcgtgccctgcactttcttccatcccataccctactacgacaagaactccccagttcatggttactggttccgggaaggagccattatatccagggactctccagtggccacaaacaagctagatcaagaagtacaggaggagactcagggcagattccgcctccttggggatcccagtaggaacaactgctccctgagcatcgtagacgccaggaggagggataatggttcatacttctttcggatggagagaggaagtaccaaatacagttacaaatctccccagctctctgtgcatgtgacagacttgacccacaggcccaaaatcctcatccctggcactctagaacccggccactccaaaaacctgacctgctctgtgtcctgggcctgtgagcagggaacacccccgatcttctcctggttgtcagctgcccccacctccctgggccccaggactactcactcctcggtgctcataatcaccccacggccccaggaccacggcaccaacctgacctgtcaggtgaagttcgctggagctggtgtgactacggagagaaccatccagctcaacgtcacctatgttccacagaacccaacaactggtatctttccaggagatggctcagggaaacaagagaccagagcaggagtggttcatggggccattggaggagctggtgttacagccctgctcgctctttgtctctgcctcatcttcttcatagtgaagacccacaggaggaaagcagccaggacagcagtgggcaggaatgacacccaccctaccacagggtcagcctccccgaaacaccagaagaagtccaagttacatggccccactgaaacctcaagctgttcaggtgccgcccctactgtggagatggatgaggagctgcattatgcttccctcaactttcatgggatgaatccttccaaggacacctccaccgaatactcagaggtcaggacccagtga

SEQ ID NO: 78 - DNA, 528 bp, Homo sapiens
atgctgcctcccatggccctgcccagtgtatcttggatgctgctttcctgcctcatgctgctgtctcaggttcaaggtgaagaaccccagagggaactgccctctgcacggatccgctgtcccaaaggctccaaggcctatggctcccactgctatgccttgtttttgtcaccaaaatcctggacagatgcagatctggcctgccagaagcggccctctggaaacctggtgtctgtgctcagtggggctgagggatccttcgtgtcctccctggtgaagagcattggtaacagctactcatacgtctggattgggctccatgaccccacacagggcaccgagcccaatggagaaggttgggagtggagtagcagtgatgtgatgaattactttgcatgggagagaaatccctccaccatctcaagccccggccactgtgcgagcctgtcgagaagcacagcatttctgaggtggaaagattataactgtaatgtgaggttaccctatgtctgcaagttcactgactag

SEQ ID NO: 79 - DNA, 528 bp, Homo sapiens; identical to SEQ ID NO: 78

SEQ ID NO: 80 - DNA, 1254 bp, Homo sapiens
atgtcgctttctaacaagctgacgctggacaagctggacgttaaagggaagcgggtcgttatgagagtcgacttcaatgttcctatgaagaacaaccagataacaaacaaccagaggattaaggctgctgtcccaagcatcaaattctgcttggacaatggagccaagtcggtagtccttatgagccacctaggccggcctgatggtgtgcccatgcctgacaagtactccttagagccagttgctgtagaactcaaatctctgctgggcaaggatgttctgttcttgaaggactgtgtaggcccagaagtggagaaagcctgtgccaacccagctgctgggtctgtcatcctgctggagaacctccgctttcatgtggaggaagaagggaagggaaaagatgcttctgggaacaaggttaaagccgagccagccaaaatagaagctttccgagcttcactttccaagctaggggatgtctatgtcaatgatgcttttggcactgctcacagagcccacagctccatggtaggagtcaatctgccacagaaggctggtgggtttttgatgaagaaggagctgaactactttgcaaaggccttggagagcccagagcgacccttcctggccatcctgggcggagctaaagttgcagacaagatccagctcatcaataatatgctggacaaagtcaatgagatgattattggtggtggaatggcttttaccttccttaaggtgctcaacaacatggagattggcacttctctgtttgatgaagagggagccaagattgtcaaagacctaatgtccaaagctgagaagaatggtgtgaagattaccttgcctgttgactttgtcactgctgacaagtttgatgagaatgccaagactggccaagccactgtggcttctggcatacctgctggctggatgggcttggactgtggtcctgaaagcagcaagaagtatgctgaggctgtcactcgggctaagcagattgtgtggaatggtcctgtgggggtatttgaatgggaagcttttgcccggggaaccaaagctctcatggatgaggtggtgaaagccacttctaggggctgcatcaccatcataggtggtggagacactgccacttgctgtgccaaatggaacacggaggataaagtcagccatgtgagcactgggggtggtgccagtttggagctcctggaaggtaaagtccttcctggggtggatgctctcagcaatatttag

SEQ ID NO: 81 - DNA, 480 bp, Homo sapiens
atggctttagagacgatctgccgaccctctgggagaaaatccagcaagatgcaagccttcagaatctgggatgttaaccagaagaccttctatctgaggaacaaccaactagttgctggatacttgcaaggaccaaatgtcaatttagaagaaaagatagatgtggtacccattgagcctcatgctctgttcttgggaatccatggagggaagatgtgcctgtcctgtgtcaagtctggtgatgagaccagactccagctggaggcagttaacatcactgacctgagcgagaacagaaagcaggacaagcgcttcgccttcatccgctcagacagcggccccaccaccagttttgagtctgccgcctgccccggttggttcctctgcacagcgatggaagctgaccagcccgtcagcctcaccaatatgcctgacgaaggcgtcatggtcaccaaattctacttccaggaggacgagtag

SEQ ID NO: 82 - DNA, 543 bp, Homo sapiens
atggctttagctgacttgtatgaagaaggaggtggaggaggaggagaaggtgaagacaatgctgactcaaaggagacgatctgccgaccctctgggagaaaatccagcaagatgcaagccttcagaatctgggatgttaaccagaagaccttctatctgaggaacaaccaactagttgctggatacttgcaaggaccaaatgtcaatttagaagaaaagatagatgtggtacccattgagcctcatgctctgttcttgggaatccatggagggaagatgtgcctgtcctgtgtcaagtctggtgatgagaccagactccagctggaggcagttaacatcactgacctgagcgagaacagaaagcaggacaagcgcttcgccttcatccgctcagacagcggccccaccaccagttttgagtctgccgcctgccccggttggttcctctgcacagcgatggaagctgaccagcccgtcagcctcaccaatatgcctgacgaaggcgtcatggtcaccaaattctacttccaggaggacgagtag

SEQ ID NO: 83 - DNA, 2481 bp, Homo sapiens
atggagggcgccggcggcgcgaacgacaagaaaaagataagttctgaacgtcgaaaagaaaagtctcgagatgcagccagatctcggcgaagtaaagaatctgaagttttttatgagcttgctcatcagttgccacttccacataatgtgagttcgcatcttgataaggcctctgtgatgaggcttaccatcagctatttgcgtgtgaggaaacttctggatgctggtgatttggatattgaagatgacatgaaagcacagatgaattgcttttatttgaaagccttggatggttttgttatggttctcacagatgatggtgacatgatttacatttctgataatgtgaacaaatacatgggattaactcagtttgaactaactggacacagtgtgtttgattttactcatccatgtgaccatgaggaaatgagagaaatgcttacacacagaaatggccttgtgaaaaagggtaaagaacaaaacacacagcgaagcttttttctcagaatgaagtgtaccctaactagccgaggaagaactatgaacataaagtctgcaacatggaaggtattgcactgcacaggccacattcacgtatatgataccaacagtaaccaacctcagtgtgggtataagaaaccacctatgacctgcttggtgctgatttgtgaacccattcctcacccatcaaatattgaaattcctttagatagcaagactttcctcagtcgacacagcctggatatgaaattttcttattgtgatgaaagaattaccgaattgatgggatatgagccagaagaacttttaggccgctcaatttatgaatattatcatgctttggactctgatcatctgaccaaaactcatcatgatatgtttactaaaggacaagtcaccacaggacagtacaggatgcttgccaaaagaggtggatatgtctgggttgaaactcaagcaactgtcatatataacaccaagaattctcaaccacagtgcattgtatgtgtgaattacgttgtgagtggtattattcagcacgacttgattttctcccttcaacaaacagaatgtgtccttaaaccggttgaatcttcagatatgaaaatgactcagctattcaccaaagttgaatcagaagatacaagtagcctctttgacaaacttaagaaggaacctgatgctttaactttgctggccccagccgctggagacacaatcatatctttagattttggcagcaacgacacagaaactgatgaccagcaacttgaggaagtaccattatataatgatgtaatgctcccctcacccaacgaaaaattacagaatataaatttggcaatgtctccattacccaccgctgaaacgccaaagccacttcgaagtagtgctgaccctgcactcaatcaagaagttgcattaaaattagaaccaaatccagagtcactggaactttcttttaccatgccccagattcaggatcagacacctagtccttccgatggaagcactagacaaagttcacctgagcctaatagtcccagtgaatattgtttttatgtggatagtgatatggtcaatgaattcaagttggaattggtagaaaaactttttgctgaagacacagaagcaaagaacccattttctactcaggacacagatttagacttggagatgttagctccctatatcccaatggatgatgacttccagttacgttccttcgatcagttgtcaccattagaaagcagttccgcaagccctgaaagcgcaagtcctcaaagcacagttacagtattccagcagactcaaatacaagaacctactgctaatgccaccactaccactgccaccactgatgaattaaaaacagtgacaaaagaccgtatggaagacattaaaatattgattgcatctccatctcctacccacatacataaagaaactactagtgccacatcatcaccatatagagatactcaaagtcggacagcctcaccaaacagagcaggaaaaggagtcatagaacagacagaaaaatctcatccaagaagccctaacgtgttatctgtcgctttgagtcaaagaactacagttcctgaggaagaactaaatccaaagatactagctttgcagaatgctcagagaaagcgaaaaatggaacatgatggttcactttttcaagcagtaggaattggaacattattacagcagccagacgatcatgcagctactacatcactttcttggaaacgtgtaaaaggatgcaaatctagtgaacagaatggaatggagcaaaagacaattattttaataccctctgatttagcatgtagactgctggggcaatcaatggatgaaagtggattaccacagctgaccagttatgattgtgaagttaatgctcctatacaaggcagcagaaacctactgcagggtgaagaattactcagagctttggatcaagttaactga

SEQ ID NO: 84 - DNA, 2208 bp, Homo sapiens
atggagggcgccggcggcgcgaacgacaagaaaaagataagttctgaacgtcgaaaagaaaagtctcgagatgcagccagatctcggcgaagtaaagaatctgaagttttttatgagcttgctcatcagttgccacttccacataatgtgagttcgcatcttgataaggcctctgtgatgaggcttaccatcagctatttgcgtgtgaggaaacttctggatgctggtgatttggatattgaagatgacatgaaagcacagatgaattgcttttatttgaaagccttggatggttttgttatggttctcacagatgatggtgacatgatttacatttctgataatgtgaacaaatacatgggattaactcagtttgaactaactggacacagtgtgtttgattttactcatccatgtgaccatgaggaaatgagagaaatgcttacacacagaaatggccttgtgaaaaagggtaaagaacaaaacacacagcgaagcttttttctcagaatgaagtgtaccctaactagccgaggaagaactatgaacataaagtctgcaacatggaaggtattgcactgcacaggccacattcacgtatatgataccaacagtaaccaacctcagtgtgggtataagaaaccacctatgacctgcttggtgctgatttgtgaacccattcctcacccatcaaatattgaaattcctttagatagcaagactttcctcagtcgacacagcctggatatgaaattttcttattgtgatgaaagaattaccgaattgatgggatatgagccagaagaacttttaggccgctcaatttatgaatattatcatgctttggactctgatcatctgaccaaaactcatcatgatatgtttactaaaggacaagtcaccacaggacagtacaggatgcttgccaaaagaggtggatatgtctgggttgaaactcaagcaactgtcatatataacaccaagaattctcaaccacagtgcattgtatgtgtgaattacgttgtgagtggtattattcagcacgacttgattttctcccttcaacaaacagaatgtgtccttaaaccggttgaatcttcagatatgaaaatgactcagctattcaccaaagttgaatcagaagatacaagtagcctctttgacaaacttaagaaggaacctgatgctttaactttgctggccccagccgctggagacacaatcatatctttagattttggcagcaacgacacagaaactgatgaccagcaacttgaggaagtaccattatataatgatgtaatgctcccctcacccaacgaaaaattacagaatataaatttggcaatgtctccattacccaccgctgaaacgccaaagccacttcgaagtagtgctgaccctgcactcaatcaagaagttgcattaaaattagaaccaaatccagagtcactggaactttcttttaccatgccccagattcaggatcagacacctagtccttccgatggaagcactagacaaagttcacctgagcctaatagtcccagtgaatattgtttttatgtggatagtgatatggtcaatgaattcaagttggaattggtagaaaaactttttgctgaagacacagaagcaaagaacccattttctactcaggacacagatttagacttggagatgttagctccctatatcccaatggatgatgacttccagttacgttccttcgatcagttgtcaccattagaaagcagttccgcaagccctgaaagcgcaagtcctcaaagcacagttacagtattccagcagactcaaatacaagaacctactgctaatgccaccactaccactgccaccactgatgaattaaaaacagtgacaaaagaccgtatggaagacattaaaatattgattgcatctccatctcctacccacatacataaagaaactactagtgccacatcatcaccatatagagatactcaaagtcggacagcctcaccaaacagagcaggaaaaggagtcatagaacagacagaaaaatctcatccaagaagccctaacgtgttatctgtcgctttgagtcaaagaactacagttcctgaggaagaactaaatccaaagatactagctttgcagaatgctcagagaaagcgaaaaatggaacatgatggttcactttttcaagcagtaggaattatttag

SEQ ID NO: 85 - DNA, 1359 bp, Homo sapiens
atggcggcgccgagcgcggggtcttggtccaccttccagcacaaggagctgatggccgctgacaggggacgcaggatattgggagtgtgtggcatgcatcctcatcatcaggaaactctaaaaaagaaccgagtggtgctagccaaacagctgttgttgagcgaattgttagaacatcttctggagaaggacatcatcaccttggaaatgagggagctcatccaggccaaagtgggcagtttcagccagaatgtggaactcctcaacttgctgcctaagaggggtccccaagcttttgatgccttctgtgaagcactgagggagaccaagcaaggccacctggaggatatgttgctcaccaccctttctgggcttcagcatgtactcccaccgttgagctgtgactacgacttgagtctcccttttccggtgtgtgagtcctgtcccctttacaagaagctccgcctgtcgacagatactgtggaacactccctagacaataaagatggtcctgtctgccttcaggtgaagccttgcactcctgaattttatcaaacacacttccagctggcatataggttgcagtctcggcctcgtggcctagcactggtgttgagcaatgtgcacttcactggagagaaagaactggaatttcgctctggaggggatgtggaccacagtactctagtcaccctcttcaagcttttgggctatgacgtccatgttctatgtgaccagactgcacaggaaatgcaagagaaactgcagaattttgcacagttacctgcacaccgagtcacggactcctgcatcgtggcactcctctcgcatggtgtggagggcgccatctatggtgtggatgggaaactgctccagctccaagaggtttttcagctctttgacaacgccaactgcccaagcctacagaacaaaccaaaaatgttcttcatccaggcctgccgtggagatgagactgatcgtggggttgaccaacaagatggaaagaaccacgcaggatcccctgggtgcgaggagagtgatgccggtaaagaaaagttgccgaagatgagactgcccacgcgctcagacatgatatgcggctatgcctgcctcaaagggactgccgccatgcggaacaccaaacgaggttcctggtacatcgaggctcttgctcaagtgttttctgagcgggcttgtgatatgcacgtggccgacatgctggttaaggtgaacgcacttatcaaggatcgggaaggttatgctcctggcacagaattccaccggtgcaaggagatgtctgaatactgcagcactctgtgccgccacctctacctgttcccaggacaccctcccacatga

SEQ ID NO: 86 - DNA, 327 bp, Homo sapiens
atggcggcgccgagcgcggggtcttggtccaccttccagcacaaggagctgatggccgctgacaggggacgcaggatattgggagtgtgtggcatgcatcctcatcatcaggaaactctaaaaaagaaccgagtggtgctagccaaacagctgttgttgagcgaattgttagaacatcttctggagaaggacatcatcaccttggaaatgagggagctcatccaggccaaagtgggcagtttcagccagaatgtggaactcctcaacttgctgcctaagaggggtccccaagcttttgatgccttctgtgaagccttgcactcctga

SEQ ID NO: 87 - DNA, 867 bp, Homo sapiens
atgggccacacacggaggcagggaacatcaccatccaagtgtccatacctcaatttctttcagctcttggtgctggctggtctttctcacttctgttcaggtgttatccacgtgaccaaggaagtgaaagaagtggcaacgctgtcctgtggtcacaatgtttctgttgaagagctggcacaaactcgcatctactggcaaaaggagaagaaaatggtgctgactatgatgtctggggacatgaatatatggcccgagtacaagaaccggaccatctttgatatcactaataacctctccattgtgatcctggctctgcgcccatctgacgagggcacatacgagtgtgttgttctgaagtatgaaaaagacgctttcaagcgggaacacctggctgaagtgacgttatcagtcaaagctgacttccctacacctagtatatctgactttgaaattccaacttctaatattagaaggataatttgctcaacctctggaggttttccagagcctcacctctcctggttggaaaatggagaagaattaaatgccatcaacacaacagtttcccaagatcctgaaactgagctctatgctgttagcagcaaactggatttcaatatgacaaccaaccacagcttcatgtgtctcatcaagtatggacatttaagagtgaatcagaccttcaactggaatacaaccaagcaagagcattttcctgataacctgctcccatcctgggccattaccttaatctcagtaaatggaatttttgtgatatgctgcctgacctactgctttgccccaagatgcagagagagaaggaggaatgagagattgagaagggaaagtgtacgccctgtataa

SEQ ID NO: 88 - DNA, 990 bp, Homo sapiens
atggatccccagtgcactatgggactgagtaacattctctttgtgatggccttcctgctctctggtgctgctcctctgaagattcaagcttatttcaatgagactgcagacctgccatgccaatttgcaaactctcaaaaccaaagcctgagtgagctagtagtattttggcaggaccaggaaaacttggttctgaatgaggtatacttaggcaaagagaaatttgacagtgttcattccaagtatatgggccgcacaagttttgattcggacagttggaccctgagacttcacaatcttcagatcaaggacaagggcttgtatcaatgtatcatccatcacaaaaagcccacaggaatgattcgcatccaccagatgaattctgaactgtcagtgcttgctaacttcagtcaacctgaaatagtaccaatttctaatataacagaaaatgtgtacataaatttgacctgctcatctatacacggttacccagaacctaagaagatgagtgttttgctaagaaccaagaattcaactatcgagtatgatggtgttatgcagaaatctcaagataatgtcacagaactgtacgacgtttccatcagcttgtctgtttcattccctgatgttacgagcaatatgaccatcttctgtattctggaaactgacaagacgcggcttttatcttcacctttctctatagagcttgaggaccctcagcctcccccagaccacattccttggattacagctgtacttccaacagttattatatgtgtgatggttttctgtctaattctatggaaatggaagaagaagaagcggcctcgcaactcttataaatgtggaaccaacacaatggagagggaagagagtgaacagaccaagaaaagagaaaaaatccatatacctgaaagatctgatgaagcccagcgtgtttttaaaagttcgaagacatcttcatgcgacaaaagtgatacatgtttttaa

SEQ ID NO: 89 - DNA, 972 bp, Homo sapiens
atgggactgagtaacattctctttgtgatggccttcctgctctctggtgctgctcctctgaagattcaagcttatttcaatgagactgcagacctgccatgccaatttgcaaactctcaaaaccaaagcctgagtgagctagtagtattttggcaggaccaggaaaacttggttctgaatgaggtatacttaggcaaagagaaatttgacagtgttcattccaagtatatgggccgcacaagttttgattcggacagttggaccctgagacttcacaatcttcagatcaaggacaagggcttgtatcaatgtatcatccatcacaaaaagcccacaggaatgattcgcatccaccagatgaattctgaactgtcagtgcttgctaacttcagtcaacctgaaatagtaccaatttctaatataacagaaaatgtgtacataaatttgacctgctcatctatacacggttacccagaacctaagaagatgagtgttttgctaagaaccaagaattcaactatcgagtatgatggtgttatgcagaaatctcaagataatgtcacagaactgtacgacgtttccatcagcttgtctgtttcattccctgatgttacgagcaatatgaccatcttctgtattctggaaactgacaagacgcggcttttatcttcacctttctctatagagcttgaggaccctcagcctcccccagaccacattccttggattacagctgtacttccaacagttattatatgtgtgatggttttctgtctaattctatggaaatggaagaagaagaagcggcctcgcaactcttataaatgtggaaccaacacaatggagagggaagagagtgaacagaccaagaaaagagaaaaaatccatatacctgaaagatctgatgaagcccagcgtgtttttaaaagttcgaagacatcttcatgcgacaaaagtgatacatgtttttaa

SEQ ID NO: 90 - RNA, 19 nt, artificial
  Oligomer
ggaagaaagaaaaggccaa

SEQ ID NO: 91 - RNA, 19 nt, artificial
  Oligomer
gcaagguggcagaagucaa

SEQ ID NO: 92 - RNA, 19 nt, artificial
  Oligomer
ggaacacuacauuuugaaa

SEQ ID NO: 93 - RNA, 19 nt, artificial
  Oligomer
aggucugugggaaaagcaa

SEQ ID NO: 94 - RNA, 19 nt, artificial
  Oligomer
gcuugagaaacuuaaagaa

SEQ ID NO: 95 - RNA, 19 nt, artificial
  Oligomer
cgccaaguccagaaccaua

SEQ ID NO: 96 - RNA, 19 nt, artificial
  Oligomer
gaagucaagaagaacggaa

SEQ ID NO: 97 - RNA, 19 nt, artificial
  Oligomer
cuacuaggaagaaagaaaa

SEQ ID NO: 98 - RNA, 19 nt, artificial
  Oligomer
caaggugauggaagaaaca

SEQ ID NO: 99 - RNA, 19 nt, artificial
  Oligomer
ggcccuacaguauugagaa

SEQ ID NO: 100 - RNA, 19 nt, artificial
  Oligomer
cacaguuuggcaauuggaa

SEQ ID NO: 101 - RNA, 19 nt, artificial
  Oligomer
guguccaugucauucaaaa

SEQ ID NO: 102 - RNA, 19 nt, artificial
  Oligomer
ggcauaauuagaaagcuaa

SEQ ID NO: 103 - RNA, 19 nt, artificial
  Oligomer
ccuccugaaggaacuaaaa

SEQ ID NO: 104 - RNA, 19 nt, artificial
  Oligomer
gaaucaggagacaaagcua

SEQ ID NO: 105 - RNA, 19 nt, artificial
  Oligomer
aguguacauugauuuccaa

SEQ ID NO: 106 - RNA, 19 nt, artificial
  Oligomer
ucaagugcagcaaagagaa

SEQ ID NO: 107 - RNA, 19 nt, artificial
  Oligomer
gaggguaaucacaagccua

SEQ ID NO: 108 - RNA, 19 nt, artificial
  Oligomer
gaaaacucuaggcauuaaa

SEQ ID NO: 109 - RNA, 19 nt, artificial
  Oligomer
cuguaucuuuccuccugaa

SEQ ID NO: 110 - RNA, 19 nt, artificial
  Oligomer
ucugcuugagaaacuuaaa

SEQ ID NO: 111 - RNA, 19 nt, artificial
  Oligomer
ggcuggucugcuugagaaa

SEQ ID NO: 112 - RNA, 19 nt, artificial
  Oligomer
ucaagauguggaaauucua

SEQ ID NO: 113 - RNA, 19 nt, artificial
  Oligomer
gggaacacuacauuuugaa

SEQ ID NO: 114 - RNA, 19 nt, artificial
  Oligomer
cuuggaaucaggagacaaa

SEQ ID NO: 115 - RNA, 19 nt, artificial
  Oligomer
uguccaugucauucaaaaa

SEQ ID NO: 116 - RNA, 19 nt, artificial
  Oligomer
gucugcuugagaaacuuaa

SEQ ID NO: 117 - RNA, 19 nt, artificial
  Oligomer
cucuugguguaaaauucaa

SEQ ID NO: 118 - RNA, 19 nt, artificial
  Oligomer
cucgggaggguaaucacaa

SEQ ID NO: 119 - RNA, 19 nt, artificial
  Oligomer
cucucaggauuagauauaa

SEQ ID NO: 120 - RNA, 19 nt, artificial
  Oligomer
cuaggaauuggcaagguga

SEQ ID NO: 121 - RNA, 19 nt, artificial
  Oligomer
ccaaggauauuguguauau

SEQ ID NO: 122 - RNA, 19 nt, artificial
  Oligomer
guggaaacuugcauggaca

SEQ ID NO: 123 - RNA, 19 nt, artificial
  Oligomer
agaagucaagaagaacgga

SEQ ID NO: 124 - RNA, 19 nt, artificial
  Oligomer
auguguccaugucauucaa

SEQ ID NO: 125 - RNA, 19 nt, artificial
  Oligomer
ccuuagaaagagaagugua

SEQ ID NO: 126 - RNA, 19 nt, artificial
  Oligomer
gacuuguucuuucagaaaa

SEQ ID NO: 127 - RNA, 19 nt, artificial
  Oligomer
aagacuuguucuuucagaa

SEQ ID NO: 128 - RNA, 19 nt, artificial
  Oligomer
gugggaggucugacauaca

SEQ ID NO: 129 - RNA, 19 nt, artificial
  Oligomer
ggaacuaaaaggaaagauu

SEQ ID NO: 130 - RNA, 19 nt, artificial
  Oligomer
gggacucuuggaaucagga

SEQ ID NO: 131 - RNA, 19 nt, artificial
  Oligomer
cugaaggaacuaaaaggaa

SEQ ID NO: 132 - RNA, 19 nt, artificial
  Oligomer
agagcucaagugcagcaaa

SEQ ID NO: 133 - RNA, 19 nt, artificial
  Oligomer
gacugacuggagagcucaa

SEQ ID NO: 134 - RNA, 19 nt, artificial
  Oligomer
caccuaaguaaauguggaa

SEQ ID NO: 135 - RNA, 19 nt, artificial
  Oligomer
aggguugacugacuggaga

SEQ ID NO: 136 - RNA, 19 nt, artificial
  Oligomer
cugacaaccacaaguggaa

SEQ ID NO: 137 - RNA, 19 nt, artificial
  Oligomer
ggcagaagucaagaagaac

SEQ ID NO: 138 - RNA, 19 nt, artificial
  Oligomer
guggcagaagucaagaaga

SEQ ID NO: 139 - RNA, 19 nt, artificial
  Oligomer
ccuuugcugacaucccuaa

SEQ ID NO: 140 - RNA, 19 nt, artificial
  Oligomer
ggaggguaaucacaagccu

SEQ ID NO: 141 - RNA, 19 nt, artificial
  Oligomer
ccaucuuucacaccagcua

SEQ ID NO: 142 - RNA, 19 nt, artificial
  Oligomer
ccuguaucuuuccuccuga

SEQ ID NO: 143 - RNA, 19 nt, artificial
  Oligomer
ccuuucaaauugugaagaa

SEQ ID NO: 144 - RNA, 19 nt, artificial
  Oligomer
ggguaaucacaagccuauu

SEQ ID NO: 145 - RNA, 19 nt, artificial
  Oligomer
gucucuacaucacagaaga

SEQ ID NO: 146 - RNA, 19 nt, artificial
  Oligomer
gggaggucugacauacaga

SEQ ID NO: 147 - RNA, 19 nt, artificial
  Oligomer
gcuaucuacuaggaagaaa

SEQ ID NO: 148 - RNA, 19 nt, artificial
  Oligomer
ccuuaacccaccuaaguaa

SEQ ID NO: 149 - RNA, 19 nt, artificial
  Oligomer
caggauuagauauaaugga

SEQ ID NO: 150 - RNA, 19 nt, artificial
  Oligomer
ucuacuaggaagaaagaaa

SEQ ID NO: 151 - RNA, 19 nt, artificial
  Oligomer
gacugaaguggacagacua

SEQ ID NO: 152 - RNA, 19 nt, artificial
  Oligomer
uguguauauuggcuugaga

SEQ ID NO: 153 - RNA, 19 nt, artificial
  Oligomer
cuguauaucugccaaggau

SEQ ID NO: 154 - RNA, 19 nt, artificial
  Oligomer
ccugaaggaacuaaaagga

SEQ ID NO: 155 - RNA, 19 nt, artificial
  Oligomer
cccuuugcugacaucccua

SEQ ID NO: 156 - RNA, 19 nt, artificial
  Oligomer
ccucuugguguaaaauuca

SEQ ID NO: 157 - RNA, 19 nt, artificial
  Oligomer
aaguaacucgaacagugaa

SEQ ID NO: 158 - RNA, 19 nt, artificial
  Oligomer
gacagacuaggaauuggca

SEQ ID NO: 159 - RNA, 19 nt, artificial
  Oligomer
gagugugaugugaaggauu

SEQ ID NO: 160 - RNA, 19 nt, artificial
  Oligomer
agacuuguucuuucagaaa

SEQ ID NO: 161 - RNA, 19 nt, artificial
  Oligomer
uggaaacauccgauauaaa

SEQ ID NO: 162 - RNA, 19 nt, artificial
  Oligomer
gaauuggcaaggugaugga

SEQ ID NO: 163 - RNA, 19 nt, artificial
  Oligomer
ugaaguggacagacuagga

SEQ ID NO: 164 - RNA, 19 nt, artificial
  Oligomer
uguauaucugccaaggaua

SEQ ID NO: 165 - RNA, 19 nt, artificial
  Oligomer
ggagacaaagcuaccacau

SEQ ID NO: 166 - RNA, 19 nt, artificial
  Oligomer
ccaccuaaguaaaugugga

SEQ ID NO: 167 - RNA, 19 nt, artificial
  Oligomer
cuacucucaggauuagaua

SEQ ID NO: 168 - RNA, 19 nt, artificial
  Oligomer
aggucugacauacagagaa

SEQ ID NO: 169 - RNA, 19 nt, artificial
  Oligomer
cucccuguauaucugccaa

SEQ ID NO: 170 - RNA, 19 nt, artificial
  Oligomer
uccuccugaaggaacuaaa

SEQ ID NO: 171 - RNA, 19 nt, artificial
  Oligomer
cuugcauggacaaccugua

SEQ ID NO: 172 - RNA, 19 nt, artificial
  Oligomer
agucaagaagaacggaaga

SEQ ID NO: 173 - RNA, 19 nt, artificial
  Oligomer
aagucaagaagaacggaag

SEQ ID NO: 174 - RNA, 19 nt, artificial
  Oligomer
aaguguacauugauuucca

SEQ ID NO: 175 - RNA, 19 nt, artificial
  Oligomer
cauccgauauaaaucucau

SEQ ID NO: 176 - RNA, 19 nt, artificial
  Oligomer
agggcuacucucaggauua

SEQ ID NO: 177 - RNA, 19 nt, artificial
  Oligomer
agaaggucucuacaucaca

SEQ ID NO: 178 - RNA, 19 nt, artificial
  Oligomer
ucgugggaggucugacaua

SEQ ID NO: 179 - RNA, 19 nt, artificial
  Oligomer
cacugauaucaacacucca

SEQ ID NO: 180 - RNA, 19 nt, artificial
  Oligomer
ggagaccacaguuuggcaa

SEQ ID NO: 181 - RNA, 19 nt, artificial
  Oligomer
aaugacagucccuuucaaa

SEQ ID NO: 182 - RNA, 19 nt, artificial
  Oligomer
gugugaugugaaggauuau

SEQ ID NO: 183 - RNA, 19 nt, artificial
  Oligomer
aaagcuaccacauguggaa

SEQ ID NO: 184 - RNA, 19 nt, artificial
  Oligomer
acuuauccuuagaaagaga

SEQ ID NO: 185 - RNA, 19 nt, artificial
  Oligomer
gguguaaaauucaagaugu

SEQ ID NO: 186 - RNA, 19 nt, artificial
  Oligomer
aaagaaaaggccaauucau

SEQ ID NO: 187 - RNA, 19 nt, artificial
  Oligomer
gaagaaagaaaaggccaau

SEQ ID NO: 188 - RNA, 19 nt, artificial
  Oligomer
cacugaggguugacugacu

SEQ ID NO: 189 - RNA, 19 nt, artificial
  Oligomer
acuccacugacaaccacaa

SEQ ID NO: 190 - RNA, 19 nt, artificial
  Oligomer
auuggagcuccuuucucaa

SEQ ID NO: 191 - RNA, 19 nt, artificial
  Oligomer
agaagaaguaacucgaaca

SEQ ID NO: 192 - RNA, 19 nt, artificial
  Oligomer
ggcuacucucaggauuaga

SEQ ID NO: 193 - RNA, 19 nt, artificial
  Oligomer
aaguuuugauguugacgga

SEQ ID NO: 194 - RNA, 19 nt, artificial
  Oligomer
gccaauucaucuaaguuuu

SEQ ID NO: 195 - RNA, 19 nt, artificial
  Oligomer
cugccaaggauauugugua

SEQ ID NO: 196 - RNA, 19 nt, artificial
  Oligomer
auucccucuugguguaaaa

SEQ ID NO: 197 - RNA, 19 nt, artificial
  Oligomer
ucuacaucacagaagaaau

SEQ ID NO: 198 - RNA, 19 nt, artificial
  Oligomer
acagacuaggaauuggcaa

SEQ ID NO: 199 - RNA, 19 nt, artificial
  Oligomer
aaguggacagacuaggaau

SEQ ID NO: 200 - RNA, 19 nt, artificial
  Oligomer
cacuccacugacaaccaca

SEQ ID NO: 201 - RNA, 19 nt, artificial
  Oligomer
ggauuauuggagcuccuuu

SEQ ID NO: 202 - RNA, 19 nt, artificial
  Oligomer
ggacccaucuuucacacca

SEQ ID NO: 203 - RNA, 19 nt, artificial
  Oligomer
aguccagaaccauagggau

SEQ ID NO: 204 - RNA, 19 nt, artificial
  Oligomer
aaagauucccgaugugcca

SEQ ID NO: 205 - RNA, 19 nt, artificial
  Oligomer
ugacaaccacaaguggaaa

SEQ ID NO: 206 - RNA, 19 nt, artificial
  Oligomer
ccacaguuuggcaauugga

SEQ ID NO: 207 - RNA, 19 nt, artificial
  Oligomer
caaauugugaagaauccaa

SEQ ID NO: 208 - RNA, 19 nt, artificial
  Oligomer
guccaugucauucaaaaaa

SEQ ID NO: 209 - RNA, 19 nt, artificial
  Oligomer
aagagaaguguacauugau

SEQ ID NO: 210 - RNA, 19 nt, artificial
  Oligomer
aggguaaucacaagccuau

SEQ ID NO: 211 - RNA, 19 nt, artificial
  Oligomer
accagaagaaguaacucga

SEQ ID NO: 212 - RNA, 19 nt, artificial
  Oligomer
gcuacucucaggauuagau

SEQ ID NO: 213 - RNA, 19 nt, artificial
  Oligomer
cagggcuacucucaggauu

SEQ ID NO: 214 - RNA, 19 nt, artificial
  Oligomer
gaaggaacuaaaaggaaag

SEQ ID NO: 215 - RNA, 19 nt, artificial
  Oligomer
cucaagugcagcaaagaga

SEQ ID NO: 216 - RNA, 19 nt, artificial
  Oligomer
ggucugugggaaaagcaag

SEQ ID NO: 217 - RNA, 19 nt, artificial
  Oligomer
cccuaaugacagucccuuu

SEQ ID NO: 218 - RNA, 19 nt, artificial
  Oligomer
cauagaguuauccuucuaa

SEQ ID NO: 219 - RNA, 19 nt, artificial
  Oligomer
ucgggaggguaaucacaag

SEQ ID NO: 220 - RNA, 19 nt, artificial
  Oligomer
agcaaagagaagugucaga

SEQ ID NO: 221 - RNA, 19 nt, artificial
  Oligomer
agguggcagaagucaagaa

SEQ ID NO: 222 - RNA, 19 nt, artificial
  Oligomer
uuggcaaggugauggaaga

SEQ ID NO: 223 - RNA, 19 nt, artificial
  Oligomer
ccacaaguggaaacuugca

SEQ ID NO: 224 - RNA, 19 nt, artificial
  Oligomer
cugugggaaaagcaagcga

SEQ ID NO: 225 - RNA, 19 nt, artificial
  Oligomer
cuuugcugacaucccuaau

SEQ ID NO: 226 - RNA, 19 nt, artificial
  Oligomer
gcauagaguuauccuucua

SEQ ID NO: 227 - RNA, 19 nt, artificial
  Oligomer
ugaacacagcaguugcaau

SEQ ID NO: 228 - RNA, 19 nt, artificial
  Oligomer
gaaggucucuacaucacag

SEQ ID NO: 229 - RNA, 19 nt, artificial
  Oligomer
uaggaauuggcaaggugau

SEQ ID NO: 230 - RNA, 19 nt, artificial
  Oligomer
uguauauuggcuugagaga

SEQ ID NO: 231 - RNA, 19 nt, artificial
  Oligomer
gcagaagucaagaagaacg

SEQ ID NO: 232 - RNA, 19 nt, artificial
  Oligomer
uguguccaugucauucaaa

SEQ ID NO: 233 - RNA, 19 nt, artificial
  Oligomer
aggagacaaagcuaccaca

SEQ ID NO: 234 - RNA, 19 nt, artificial
  Oligomer
cuaacuuggcaaaagacuu

SEQ ID NO: 235 - RNA, 19 nt, artificial
  Oligomer
uuucuaacuuggcaaaaga

SEQ ID NO: 236 - RNA, 19 nt, artificial
  Oligomer
guaaaauucaagaugugga

SEQ ID NO: 237 - RNA, 19 nt, artificial
  Oligomer
cuaaagacuuguucuuuca

SEQ ID NO: 238 - RNA, 19 nt, artificial
  Oligomer
caaaacagggcuacucuca

SEQ ID NO: 239 - RNA, 19 nt, artificial
  Oligomer
uaucuacuaggaagaaaga

SEQ ID NO: 240 - RNA, 19 nt, artificial
  Oligomer
aagagaagugucagagcau

SEQ ID NO: 241 - RNA, 19 nt, artificial
  Oligomer
uggaaacuugcauggacaa

SEQ ID NO: 242 - RNA, 19 nt, artificial
  Oligomer
acuaccuuaacccaccuaa

SEQ ID NO: 243 - RNA, 19 nt, artificial
  Oligomer
ggauuagauauaauggaag

SEQ ID NO: 244 - RNA, 19 nt, artificial
  Oligomer
aggucucuacaucacagaa

SEQ ID NO: 245 - RNA, 19 nt, artificial
  Oligomer
aggaagaaagaaaaggcca

SEQ ID NO: 246 - RNA, 19 nt, artificial
  Oligomer
uggaagaaacacucagcua

SEQ ID NO: 247 - RNA, 19 nt, artificial
  Oligomer
ggcaaggugauggaagaaa

SEQ ID NO: 248 - RNA, 19 nt, artificial
  Oligomer
aauuggcaaggugauggaa

SEQ ID NO: 249 - RNA, 19 nt, artificial
  Oligomer
cagaagucaagaagaacgg

SEQ ID NO: 250 - RNA, 19 nt, artificial
  Oligomer
auccaaggucugugggaaa

SEQ ID NO: 251 - RNA, 19 nt, artificial
  Oligomer
aacaagagugugaugugaa

SEQ ID NO: 252 - RNA, 19 nt, artificial
  Oligomer
gaacagugaacacagcagu

SEQ ID NO: 253 - RNA, 19 nt, artificial
  Oligomer
ggucugacauacagagaag

SEQ ID NO: 254 - RNA, 19 nt, artificial
  Oligomer
gaggucugacauacagaga

SEQ ID NO: 255 - RNA, 19 nt, artificial
  Oligomer
agcuaucuacuaggaagaa

SEQ ID NO: 256 - RNA, 19 nt, artificial
  Oligomer
cucagcuaucuacuaggaa

SEQ ID NO: 257 - RNA, 19 nt, artificial
  Oligomer
gaauccaaggucuguggga

SEQ ID NO: 258 - RNA, 19 nt, artificial
  Oligomer
gagagcucaagugcagcaa

SEQ ID NO: 259 - RNA, 19 nt, artificial
  Oligomer
aggcccuacaguauugaga

SEQ ID NO: 260 - RNA, 19 nt, artificial
  Oligomer
ccuucuaaagacuuguucu

SEQ ID NO: 261 - RNA, 19 nt, artificial
  Oligomer
caagccuauugacuaccuu

SEQ ID NO: 262 - RNA, 19 nt, artificial
  Oligomer
acuugcucgggaggguaau

SEQ ID NO: 263 - RNA, 19 nt, artificial
  Oligomer
agauauaauggaagugaac

SEQ ID NO: 264 - RNA, 19 nt, artificial
  Oligomer
ugauguugacggacuggac

SEQ ID NO: 265 - RNA, 19 nt, artificial
  Oligomer
gaaccauagggauuauugg

SEQ ID NO: 266 - RNA, 19 nt, artificial
  Oligomer
aaaaggccaauucaucuaa

SEQ ID NO: 267 - RNA, 19 nt, artificial
  Oligomer
cuaucuacuaggaagaaag

SEQ ID NO: 268 - RNA, 19 nt, artificial
  Oligomer
gugauggaagaaacacuca

SEQ ID NO: 269 - RNA, 19 nt, artificial
  Oligomer
ucaucuggguggaugcuca

SEQ ID NO: 270 - RNA, 19 nt, artificial
  Oligomer
ucaagaagaacggaagaau

SEQ ID NO: 271 - RNA, 19 nt, artificial
  Oligomer
aauccaaggucugugggaa

SEQ ID NO: 272 - RNA, 19 nt, artificial
  Oligomer
cuuauccuuagaaagagaa

SEQ ID NO: 273 - RNA, 19 nt, artificial
  Oligomer
aaauguggaaacauccgau

SEQ ID NO: 274 - RNA, 19 nt, artificial
  Oligomer
ggcuuguuucggacuugcu

SEQ ID NO: 275 - RNA, 19 nt, artificial
  Oligomer
cgaacagugaacacagcag

SEQ ID NO: 276 - RNA, 19 nt, artificial
  Oligomer
agagugugaugugaaggau

SEQ ID NO: 277 - RNA, 19 nt, artificial
  Oligomer
uggucugcuugagaaacuu

SEQ ID NO: 278 - RNA, 19 nt, artificial
  Oligomer
guacuauguguccauguca

SEQ ID NO: 279 - RNA, 19 nt, artificial
  Oligomer
ugcuggcauuaaaaauaag

SEQ ID NO: 280 - RNA, 19 nt, artificial
  Oligomer
cuugguguaaaauucaaga

SEQ ID NO: 281 - RNA, 19 nt, artificial
  Oligomer
cuuaacccaccuaaguaaa

SEQ ID NO: 282 - RNA, 19 nt, artificial
  Oligomer
cagcaguugcaauaaccuu

SEQ ID NO: 283 - RNA, 19 nt, artificial
  Oligomer
gugaacacagcaguugcaa

SEQ ID NO: 284 - RNA, 19 nt, artificial
  Oligomer
agagaaggucucuacauca

SEQ ID NO: 285 - RNA, 19 nt, artificial
  Oligomer
uacagagaaggucucuaca

SEQ ID NO: 286 - RNA, 19 nt, artificial
  Oligomer
gacccaucuuucacaccag

SEQ ID NO: 287 - RNA, 19 nt, artificial
  Oligomer
acuggacccaucuuucaca

SEQ ID NO: 288 - RNA, 19 nt, artificial
  Oligomer
aaagagaagugucagagca

SEQ ID NO: 289 - RNA, 19 nt, artificial
  Oligomer
gucccuuucaaauugugaa

SEQ ID NO: 290 - RNA, 19 nt, artificial
  Oligomer
aaggcuggucugcuugaga

SEQ ID NO: 291 - RNA, 19 nt, artificial
  Oligomer
caaagcuaccacaugugga

SEQ ID NO: 292 - RNA, 19 nt, artificial
  Oligomer
guguacauugauuuccaau

SEQ ID NO: 293 - RNA, 19 nt, artificial
  Oligomer
cuccuuucucaaagggaca

SEQ ID NO: 294 - RNA, 19 nt, artificial
  Oligomer
uauugacuaccuuaaccca

SEQ ID NO: 295 - RNA, 19 nt, artificial
  Oligomer
agccuauugacuaccuuaa

SEQ ID NO: 296 - RNA, 19 nt, artificial
  Oligomer
agaaguaacucgaacagug

SEQ ID NO: 297 - RNA, 19 nt, artificial
  Oligomer
agaaaaggccaauucaucu

SEQ ID NO: 298 - RNA, 19 nt, artificial
  Oligomer
cagcuaucuacuaggaaga

SEQ ID NO: 299 - RNA, 19 nt, artificial
  Oligomer
cucuaggcauuaaauacuu

SEQ ID NO: 300 - RNA, 19 nt, artificial
  Oligomer
gcauggacaaccuguaucu

SEQ ID NO: 301 - RNA, 19 nt, artificial
  Oligomer
gagaccacaguuuggcaau

SEQ ID NO: 302 - RNA, 19 nt, artificial
  Oligomer
ugugaagaauccaaggucu

SEQ ID NO: 303 - RNA, 19 nt, artificial
  Oligomer
agucccuuucaaauuguga

SEQ ID NO: 304 - RNA, 19 nt, artificial
  Oligomer
augacagucccuuucaaau

SEQ ID NO: 305 - RNA, 19 nt, artificial
  Oligomer
ccaugucauucaaaaaaug

SEQ ID NO: 306 - RNA, 19 nt, artificial
  Oligomer
gaaggcccuacaguauuga

SEQ ID NO: 307 - RNA, 19 nt, artificial
  Oligomer
aucucauaguuaauggcau

SEQ ID NO: 308 - RNA, 19 nt, artificial
  Oligomer
cagaagaaguaacucgaac

SEQ ID NO: 309 - RNA, 19 nt, artificial
  Oligomer
aaccauagggauuauugga

SEQ ID NO: 310 - RNA, 19 nt, artificial
  Oligomer
uggcaaggugauggaagaa

SEQ ID NO: 311 - RNA, 19 nt, artificial
  Oligomer
uuggcuugagagacgugga

SEQ ID NO: 312 - RNA, 19 nt, artificial
  Oligomer
augagcgccaaguccagaa

SEQ ID NO: 313 - RNA, 19 nt, artificial
  Oligomer
acauguggaaagguacuau

SEQ ID NO: 314 - RNA, 19 nt, artificial
  Oligomer
aauucccucuugguguaaa

SEQ ID NO: 315 - RNA, 19 nt, artificial
  Oligomer
accuuaacccaccuaagua

SEQ ID NO: 316 - RNA, 19 nt, artificial
  Oligomer
aguggacagacuaggaauu

SEQ ID NO: 317 - RNA, 19 nt, artificial
  Oligomer
guauaucugccaaggauau

SEQ ID NO: 318 - RNA, 19 nt, artificial
  Oligomer
ccuguauaucugccaagga

SEQ ID NO: 319 - RNA, 19 nt, artificial
  Oligomer
augcucacacugauaucaa

SEQ ID NO: 320 - RNA, 19 nt, artificial
  Oligomer
caagugcagcaaagagaag

SEQ ID NO: 321 - RNA, 19 nt, artificial
  Oligomer
aagagugugaugugaagga

SEQ ID NO: 322 - RNA, 19 nt, artificial
  Oligomer
gaaacuuaaagaacaagag

SEQ ID NO: 323 - RNA, 19 nt, artificial
  Oligomer
ugcuugagaaacuuaaaga

SEQ ID NO: 324 - RNA, 19 nt, artificial
  Oligomer
ccuacaguauugagaaagg

SEQ ID NO: 325 - RNA, 19 nt, artificial
  Oligomer
guguaaaauucaagaugug

SEQ ID NO: 326 - RNA, 19 nt, artificial
  Oligomer
ccgauauaaaucucauagu

SEQ ID NO: 327 - RNA, 19 nt, artificial
  Oligomer
accuaaguaaauguggaaa

SEQ ID NO: 328 - RNA, 19 nt, artificial
  Oligomer
acaucacagaagaaaucua

SEQ ID NO: 329 - RNA, 19 nt, artificial
  Oligomer
uuuugaaaacucuaggcau

SEQ ID NO: 330 - RNA, 19 nt, artificial
  Oligomer
ggauauuguguauauuggc

SEQ ID NO: 331 - RNA, 19 nt, artificial
  Oligomer
cccugaucuuggagucauc

SEQ ID NO: 332 - RNA, 19 nt, artificial
  Oligomer
aaggucugugggaaaagca

SEQ ID NO: 333 - RNA, 19 nt, artificial
  Oligomer
cuaaugacagucccuuuca

SEQ ID NO: 334 - RNA, 19 nt, artificial
  Oligomer
ucuuggaaucaggagacaa

SEQ ID NO: 335 - RNA, 19 nt, artificial
  Oligomer
gacucuuggaaucaggaga

SEQ ID NO: 336 - RNA, 19 nt, artificial
  Oligomer
ccauacauagagugggacu

SEQ ID NO: 337 - RNA, 19 nt, artificial
  Oligomer
agauguggaaauucuaacu

SEQ ID NO: 338 - RNA, 19 nt, artificial
  Oligomer
aauguggaaacauccgaua

SEQ ID NO: 339 - RNA, 19 nt, artificial
  Oligomer
acucgaacagugaacacag

SEQ ID NO: 340 - RNA, 19 nt, artificial
  Oligomer
acagggcuacucucaggau

SEQ ID NO: 341 - RNA, 19 nt, artificial
  Oligomer
aucacagaagaaaucuaca

SEQ ID NO: 342 - RNA, 19 nt, artificial
  Oligomer
ggaggucugacauacagag

SEQ ID NO: 343 - RNA, 19 nt, artificial
  Oligomer
gccaaguccagaaccauag

SEQ ID NO: 344 - RNA, 19 nt, artificial
  Oligomer
cuuuccuccugaaggaacu

SEQ ID NO: 345 - RNA, 19 nt, artificial
  Oligomer
aguggaaacuugcauggac

SEQ ID NO: 346 - RNA, 19 nt, artificial
  Oligomer
gucaagaagaacggaagaa

SEQ ID NO: 347 - RNA, 19 nt, artificial
  Oligomer
ccaaggucugugggaaaag

SEQ ID NO: 348 - RNA, 19 nt, artificial
  Oligomer
aaagguacuauguguccau

SEQ ID NO: 349 - RNA, 19 nt, artificial
  Oligomer
gcauuaaaaauaagcacac

SEQ ID NO: 350 - RNA, 19 nt, artificial
  Oligomer
ggcauuaaaaauaagcaca

SEQ ID NO: 351 - RNA, 19 nt, artificial
  Oligomer
uagaaagagaaguguacau

SEQ ID NO: 352 - RNA, 19 nt, artificial
  Oligomer
cuuagaaagagaaguguac

SEQ ID NO: 353 - RNA, 19 nt, artificial
  Oligomer
aagccuauugacuaccuua

SEQ ID NO: 354 - RNA, 19 nt, artificial
  Oligomer
guaacucgaacagugaaca

SEQ ID NO: 355 - RNA, 19 nt, artificial
  Oligomer
aagacaccagaagaaguaa

SEQ ID NO: 356 - RNA, 19 nt, artificial
  Oligomer
gggauuauuggagcuccuu

SEQ ID NO: 357 - RNA, 19 nt, artificial
  Oligomer
ugaggguugacugacugga

SEQ ID NO: 358 - RNA, 19 nt, artificial
  Oligomer
cagacuaggaauuggcaag

SEQ ID NO: 359 - RNA, 19 nt, artificial
  Oligomer
guggaugcucacacugaua

SEQ ID NO: 360 - RNA, 19 nt, artificial
  Oligomer
agaagaacggaagaaucag

SEQ ID NO: 361 - RNA, 19 nt, artificial
  Oligomer
agcucaagugcagcaaaga

SEQ ID NO: 362 - RNA, 19 nt, artificial
  Oligomer
acuggagagcucaagugca

SEQ ID NO: 363 - RNA, 19 nt, artificial
  Oligomer
uaaagaacaagagugugau

SEQ ID NO: 364 - RNA, 19 nt, artificial
  Oligomer
gucacugaggguugacuga

SEQ ID NO: 365 - RNA, 19 nt, artificial
  Oligomer
caguauugagaaaggcugg

SEQ ID NO: 366 - RNA, 19 nt, artificial
  Oligomer
ugacugacuggagagcuca

SEQ ID NO: 367 - RNA, 19 nt, artificial
  Oligomer
cacauguggaaagguacua

SEQ ID NO: 368 - RNA, 19 nt, artificial
  Oligomer
ccacauguggaaagguacu

SEQ ID NO: 369 - RNA, 19 nt, artificial
  Oligomer
uaccacauguggaaaggua

SEQ ID NO: 370 - RNA, 19 nt, artificial
  Oligomer
aagcuaccacauguggaaa

SEQ ID NO: 371 - RNA, 19 nt, artificial
  Oligomer
cucauaguuaauggcauaa

SEQ ID NO: 372 - RNA, 19 nt, artificial
  Oligomer
gcuuguuucggacuugcuc

SEQ ID NO: 373 - RNA, 19 nt, artificial
  Oligomer
ucucuacaucacagaagaa

SEQ ID NO: 374 - RNA, 19 nt, artificial
  Oligomer
aggugauggaagaaacacu

SEQ ID NO: 375 - RNA, 19 nt, artificial
  Oligomer
guguauauuggcuugagag

SEQ ID NO: 376 - RNA, 19 nt, artificial
  Oligomer
ucaaauugugaagaaucca

SEQ ID NO: 377 - RNA, 19 nt, artificial
  Oligomer
ugaugugaaggauuauggg

SEQ ID NO: 378 - RNA, 19 nt, artificial
  Oligomer
uagagugggacucuuggaa

SEQ ID NO: 379 - RNA, 19 nt, artificial
  Oligomer
cuaccuuaacccaccuaag

SEQ ID NO: 380 - RNA, 19 nt, artificial
  Oligomer
aacagugaacacagcaguu

SEQ ID NO: 381 - RNA, 19 nt, artificial
  Oligomer
agggauuauuggagcuccu

SEQ ID NO: 382 - RNA, 19 nt, artificial
  Oligomer
cauagggauuauuggagcu

SEQ ID NO: 383 - RNA, 19 nt, artificial
  Oligomer
aaaaggaaagauucccgau

SEQ ID NO: 384 - RNA, 19 nt, artificial
  Oligomer
uaaaaggaaagauucccga

SEQ ID NO: 385 - RNA, 19 nt, artificial
  Oligomer
cagcaaagagaagugucag

SEQ ID NO: 386 - RNA, 19 nt, artificial
  Oligomer
gaugcucacacugauauca

SEQ ID NO: 387 - RNA, 19 nt, artificial
  Oligomer
guuuggcaauuggaagcau

SEQ ID NO: 388 - RNA, 19 nt, artificial
  Oligomer
acaguuuggcaauuggaag

SEQ ID NO: 389 - RNA, 19 nt, artificial
  Oligomer
gaagaaucagccuggugcu

SEQ ID NO: 390 - RNA, 19 nt, artificial
  Oligomer
acggaagaaucagccuggu

SEQ ID NO: 391 - RNA, 19 nt, artificial
  Oligomer
auagagugggacucuugga

SEQ ID NO: 392 - RNA, 19 nt, artificial
  Oligomer
cauagagugggacucuugg

SEQ ID NO: 393 - RNA, 19 nt, artificial
  Oligomer
cuggcauuaaaaauaagca

SEQ ID NO: 394 - RNA, 19 nt, artificial
  Oligomer
gacuuauccuuagaaagag

SEQ ID NO: 395 - RNA, 19 nt, artificial
  Oligomer
cauacagagaaggucucua

SEQ ID NO: 396 - RNA, 19 nt, artificial
  Oligomer
aaggccaauucaucuaagu

SEQ ID NO: 397 - RNA, 19 nt, artificial
  Oligomer
ugauggaagaaacacucag

SEQ ID NO: 398 - RNA, 19 nt, artificial
  Oligomer
uugcauggacaaccuguau

SEQ ID NO: 399 - RNA, 19 nt, artificial
  Oligomer
gcaauuggaagcaucucug

SEQ ID NO: 400 - RNA, 19 nt, artificial
  Oligomer
gguggcagaagucaagaag

SEQ ID NO: 401 - RNA, 19 nt, artificial
  Oligomer
cauguggaaagguacuaug

SEQ ID NO: 402 - RNA, 19 nt, artificial
  Oligomer
agagugggacucuuggaau

SEQ ID NO: 403 - RNA, 19 nt, artificial
  Oligomer
agcuccuuucucaaaggga

SEQ ID NO: 404 - RNA, 19 nt, artificial
  Oligomer
uuggagcuccuuucucaaa

SEQ ID NO: 405 - RNA, 19 nt, artificial
  Oligomer
agugaacacagcaguugca

SEQ ID NO: 406 - RNA, 19 nt, artificial
  Oligomer
uacucucaggauuagauau

SEQ ID NO: 407 - RNA, 19 nt, artificial
  Oligomer
ccauagggauuauuggagc

SEQ ID NO: 408 - RNA, 19 nt, artificial
  Oligomer
aggccaauucaucuaaguu

SEQ ID NO: 409 - RNA, 19 nt, artificial
  Oligomer
acuuuucaaugacugaagu

SEQ ID NO: 410 - RNA, 19 nt, artificial
  Oligomer
gccaaggauauuguguaua

SEQ ID NO: 411 - RNA, 19 nt, artificial
  Oligomer
cauggacaaccuguaucuu

SEQ ID NO: 412 - RNA, 19 nt, artificial
  Oligomer
caaagagaagugucagagc

SEQ ID NO: 413 - RNA, 19 nt, artificial
  Oligomer
gcucacacugauaucaaca

SEQ ID NO: 414 - RNA, 19 nt, artificial
  Oligomer
cuggucugcuugagaaacu

SEQ ID NO: 415 - RNA, 19 nt, artificial
  Oligomer
gaaagguacuaugugucca

SEQ ID NO: 416 - RNA, 19 nt, artificial
  Oligomer
uuagaaagagaaguguaca

SEQ ID NO: 417 - RNA, 19 nt, artificial
  Oligomer
aagacuuauccuuagaaag

SEQ ID NO: 418 - RNA, 19 nt, artificial
  Oligomer
gcuccuuucucaaagggac

SEQ ID NO: 419 - RNA, 19 nt, artificial
  Oligomer
gacuaccuuaacccaccua

SEQ ID NO: 420 - RNA, 19 nt, artificial
  Oligomer
aaucuacaaaacagggcua

SEQ ID NO: 421 - RNA, 19 nt, artificial
  Oligomer
aaggaacuaaaaggaaaga

SEQ ID NO: 422 - RNA, 19 nt, artificial
  Oligomer
caaccacaaguggaaacuu

SEQ ID NO: 423 - RNA, 19 nt, artificial
  Oligomer
uggagucaucuggguggau

SEQ ID NO: 424 - RNA, 19 nt, artificial
  Oligomer
gaaaagcaagcgagcagcu

SEQ ID NO: 425 - RNA, 19 nt, artificial
  Oligomer
ugugggaaaagcaagcgag

SEQ ID NO: 426 - RNA, 19 nt, artificial
  Oligomer
caaggucugugggaaaagc

SEQ ID NO: 427 - RNA, 19 nt, artificial
  Oligomer
ugaagaauccaaggucugu

SEQ ID NO: 428 - RNA, 19 nt, artificial
  Oligomer
acuauguguccaugucauu

SEQ ID NO: 429 - RNA, 19 nt, artificial
  Oligomer
cuucuaaagacuuguucuu

SEQ ID NO: 430 - RNA, 19 nt, artificial
  Oligomer
gaguuauccuucuaaagac

SEQ ID NO: 431 - RNA, 19 nt, artificial
  Oligomer
ucgaacagugaacacagca

SEQ ID NO: 432 - RNA, 19 nt, artificial
  Oligomer
acucucaggauuagauaua

SEQ ID NO: 433 - RNA, 19 nt, artificial
  Oligomer
aaaacagggcuacucucag

SEQ ID NO: 434 - RNA, 19 nt, artificial
  Oligomer
aaaggccaauucaucuaag

SEQ ID NO: 435 - RNA, 19 nt, artificial
  Oligomer
uuugaaaacucuaggcauu

SEQ ID NO: 436 - RNA, 19 nt, artificial
  Oligomer
ugggugacucccuguauau

SEQ ID NO: 437 - RNA, 19 nt, artificial
  Oligomer
agagaagugucagagcaug

SEQ ID NO: 438 - RNA, 19 nt, artificial
  Oligomer
uaucuuuccuccugaagga

SEQ ID NO: 439 - RNA, 19 nt, artificial
  Oligomer
aacacuccacugacaacca

SEQ ID NO: 440 - RNA, 19 nt, artificial
  Oligomer
ugcucacacugauaucaac

SEQ ID NO: 441 - RNA, 19 nt, artificial
  Oligomer
cagucccuuucaaauugug

SEQ ID NO: 442 - RNA, 19 nt, artificial
  Oligomer
aaagacuuguucuuucaga

SEQ ID NO: 443 - RNA, 19 nt, artificial
  Oligomer
ccuuggcuuguuucggacu

SEQ ID NO: 444 - RNA, 19 nt, artificial
  Oligomer
acagcaguugcaauaaccu

SEQ ID NO: 445 - RNA, 19 nt, artificial
  Oligomer
gacaccagaagaaguaacu

SEQ ID NO: 446 - RNA, 19 nt, artificial
  Oligomer
gacuggacccaucuuucac

SEQ ID NO: 447 - RNA, 19 nt, artificial
  Oligomer
agaaacacucagcuaucua

SEQ ID NO: 448 - RNA, 19 nt, artificial
  Oligomer
gauggaagaaacacucagc

SEQ ID NO: 449 - RNA, 19 nt, artificial
  Oligomer
aaguccagaaccauaggga

SEQ ID NO: 450 - RNA, 19 nt, artificial
  Oligomer
ggacagacuaggaauuggc

SEQ ID NO: 451 - RNA, 19 nt, artificial
  Oligomer
gauauuguguauauuggcu

SEQ ID NO: 452 - RNA, 19 nt, artificial
  Oligomer
gaaagauucccgaugugcc

SEQ ID NO: 453 - RNA, 19 nt, artificial
  Oligomer
aaguggaaacuugcaugga

SEQ ID NO: 454 - RNA, 19 nt, artificial
  Oligomer
ccugaucuuggagucaucu

SEQ ID NO: 455 - RNA, 19 nt, artificial
  Oligomer
uccaaggucugugggaaaa

SEQ ID NO: 456 - RNA, 19 nt, artificial
  Oligomer
uacuauguguccaugucau

SEQ ID NO: 457 - RNA, 19 nt, artificial
  Oligomer
auguggaaagguacuaugu

SEQ ID NO: 458 - RNA, 19 nt, artificial
  Oligomer
ucuuaagcauagaguuauc

SEQ ID NO: 459 - RNA, 19 nt, artificial
  Oligomer
acauccgauauaaaucuca

SEQ ID NO: 460 - RNA, 19 nt, artificial
  Oligomer
ccuaaguaaauguggaaac

SEQ ID NO: 461 - RNA, 19 nt, artificial
  Oligomer
ugacuaccuuaacccaccu

SEQ ID NO: 462 - RNA, 19 nt, artificial
  Oligomer
gccuauugacuaccuuaac

SEQ ID NO: 463 - RNA, 19 nt, artificial
  Oligomer
cucgaacagugaacacagc

SEQ ID NO: 464 - RNA, 19 nt, artificial
  Oligomer
aacagggcuacucucagga

SEQ ID NO: 465 - RNA, 19 nt, artificial
  Oligomer
cucuacaucacagaagaaa

SEQ ID NO: 466 - RNA, 19 nt, artificial
  Oligomer
guuuugauguugacggacu

SEQ ID NO: 467 - RNA, 19 nt, artificial
  Oligomer
ccaauucaucuaaguuuug

SEQ ID NO: 468 - RNA, 19 nt, artificial
  Oligomer
cagaaccauagggauuauu

SEQ ID NO: 469 - RNA, 19 nt, artificial
  Oligomer
uugaaaacucuaggcauua

SEQ ID NO: 470 - RNA, 19 nt, artificial
  Oligomer
aggauauuguguauauugg

SEQ ID NO: 471 - RNA, 19 nt, artificial
  Oligomer
gugacucccuguauaucug

SEQ ID NO: 472 - RNA, 19 nt, artificial
  Oligomer
ggaugcucacacugauauc

SEQ ID NO: 473 - RNA, 19 nt, artificial
  Oligomer
uggaagcaucucuggccau

SEQ ID NO: 474 - RNA, 19 nt, artificial
  Oligomer
caauuggaagcaucucugg

SEQ ID NO: 475 - RNA, 19 nt, artificial
  Oligomer
agaccacaguuuggcaauu

SEQ ID NO: 476 - RNA, 19 nt, artificial
  Oligomer
gaagaacggaagaaucagc

SEQ ID NO: 477 - RNA, 19 nt, artificial
  Oligomer
agaacaagagugugaugug

SEQ ID NO: 478 - RNA, 19 nt, artificial
  Oligomer
cugacuggagagcucaagu

SEQ ID NO: 479 - RNA, 19 nt, artificial
  Oligomer
cugcuugagaaacuuaaag

SEQ ID NO: 480 - RNA, 19 nt, artificial
  Oligomer
gacuaggaauuggcaaggu

SEQ ID NO: 481 - RNA, 19 nt, artificial
  Oligomer
agaagugucagagcaugag

SEQ ID NO: 482 - RNA, 19 nt, artificial
  Oligomer
uggaugcucacacugauau

SEQ ID NO: 483 - RNA, 19 nt, artificial
  Oligomer
gcucaagugcagcaaagag

SEQ ID NO: 484 - RNA, 19 nt, artificial
  Oligomer
cucuuggaaucaggagaca

SEQ ID NO: 485 - RNA, 19 nt, artificial
  Oligomer
gugggacucuuggaaucag

SEQ ID NO: 486 - RNA, 19 nt, artificial
  Oligomer
auguggaaacauccgauau

SEQ ID NO: 487 - RNA, 19 nt, artificial
  Oligomer
uaaauguggaaacauccga

SEQ ID NO: 488 - RNA, 19 nt, artificial
  Oligomer
cuuggcuuguuucggacuu

SEQ ID NO: 489 - RNA, 19 nt, artificial
  Oligomer
aacucgaacagugaacaca

SEQ ID NO: 490 - RNA, 19 nt, artificial
  Oligomer
cagagaaggucucuacauc

SEQ ID NO: 491 - RNA, 19 nt, artificial
  Oligomer
aagaaaaggccaauucauc

SEQ ID NO: 492 - RNA, 19 nt, artificial
  Oligomer
cuccacugacaaccacaag

SEQ ID NO: 493 - RNA, 19 nt, artificial
  Oligomer
uauugagaaaggcuggucu

SEQ ID NO: 494 - RNA, 19 nt, artificial
  Oligomer
uguggaaagguacuaugug

SEQ ID NO: 495 - RNA, 19 nt, artificial
  Oligomer
cccucuugguguaaaauuc

SEQ ID NO: 496 - RNA, 19 nt, artificial
  Oligomer
aaauucccucuugguguaa

SEQ ID NO: 497 - RNA, 19 nt, artificial
  Oligomer
ggagcuccuuucucaaagg

SEQ ID NO: 498 - RNA, 19 nt, artificial
  Oligomer
aaccuuggcuuguuucgga

SEQ ID NO: 499 - RNA, 19 nt, artificial
  Oligomer
gauuauuggagcuccuuuc

SEQ ID NO: 500 - RNA, 19 nt, artificial
  Oligomer
ucuaaguuuugauguugac

SEQ ID NO: 501 - RNA, 19 nt, artificial
  Oligomer
uacuaggaagaaagaaaag

SEQ ID NO: 502 - RNA, 19 nt, artificial
  Oligomer
aaacacucagcuaucuacu

SEQ ID NO: 503 - RNA, 19 nt, artificial
  Oligomer
ggugacucccuguauaucu

SEQ ID NO: 504 - RNA, 19 nt, artificial
  Oligomer
aggaacuaaaaggaaagau

SEQ ID NO: 505 - RNA, 19 nt, artificial
  Oligomer
caaccuguaucuuuccucc

SEQ ID NO: 506 - RNA, 19 nt, artificial
  Oligomer
cacaaguggaaacuugcau

SEQ ID NO: 507 - RNA, 19 nt, artificial
  Oligomer
ucaacacuccacugacaac

SEQ ID NO: 508 - RNA, 19 nt, artificial
  Oligomer
ggcaauuggaagcaucucu

SEQ ID NO: 509 - RNA, 19 nt, artificial
  Oligomer
aagguggcagaagucaaga

SEQ ID NO: 510 - RNA, 19 nt, artificial
  Oligomer
cuacaaauucccucuuggu

SEQ ID NO: 511 - RNA, 19 nt, artificial
  Oligomer
cucaggauuagauauaaug

SEQ ID NO: 512 - RNA, 19 nt, artificial
  Oligomer
uacaaaacagggcuacucu

SEQ ID NO: 513 - RNA, 19 nt, artificial
  Oligomer
acagagaaggucucuacau

SEQ ID NO: 514 - RNA, 19 nt, artificial
  Oligomer
cuaggaagaaagaaaaggc

SEQ ID NO: 515 - RNA, 19 nt, artificial
  Oligomer
ggugauggaagaaacacuc

SEQ ID NO: 516 - RNA, 19 nt, artificial
  Oligomer
caaugacugaaguggacag

SEQ ID NO: 517 - RNA, 19 nt, artificial
  Oligomer
acuugcauggacaaccugu

SEQ ID NO: 518 - RNA, 19 nt, artificial
  Oligomer
cugauaucaacacuccacu

SEQ ID NO: 519 - RNA, 19 nt, artificial
  Oligomer
uuggagucaucugggugga

SEQ ID NO: 520 - RNA, 19 nt, artificial
  Oligomer
cccuuucaaauugugaaga

SEQ ID NO: 521 - RNA, 19 nt, artificial
  Oligomer
gcuggucugcuugagaaac

SEQ ID NO: 522 - RNA, 19 nt, artificial
  Oligomer
gacaaagcuaccacaugug

SEQ ID NO: 523 - RNA, 19 nt, artificial
  Oligomer
ugggacucuuggaaucagg

SEQ ID NO: 524 - RNA, 19 nt, artificial
  Oligomer
aacuuggcaaaagacuuau

SEQ ID NO: 525 - RNA, 19 nt, artificial
  Oligomer
acaaauucccucuuggugu

SEQ ID NO: 526 - RNA, 19 nt, artificial
  Oligomer
aguuauccuucuaaagacu

SEQ ID NO: 527 - RNA, 19 nt, artificial
  Oligomer
cauuuucuuaagcauagag

SEQ ID NO: 528 - RNA, 19 nt, artificial
  Oligomer
cacagcaguugcaauaacc

SEQ ID NO: 529 - RNA, 19 nt, artificial
  Oligomer
aacacagcaguugcaauaa

SEQ ID NO: 530 - RNA, 19 nt, artificial
  Oligomer
acaaaacagggcuacucuc

SEQ ID NO: 531 - RNA, 19 nt, artificial
  Oligomer
ugggaggucugacauacag

SEQ ID NO: 532 - RNA, 19 nt, artificial
  Oligomer
uuuugauguugacggacug

SEQ ID NO: 533 - RNA, 19 nt, artificial
  Oligomer
cacucagcuaucuacuagg

SEQ ID NO: 534 - RNA, 19 nt, artificial
  Oligomer
aacacucagcuaucuacua

SEQ ID NO: 535 - RNA, 19 nt, artificial
  Oligomer
acuaggaauuggcaaggug

SEQ ID NO: 536 - RNA, 19 nt, artificial
  Oligomer
ucaaugacugaaguggaca

SEQ ID NO: 537 - RNA, 19 nt, artificial
  Oligomer
uuucaaugacugaagugga

SEQ ID NO: 538 - RNA, 19 nt, artificial
  Oligomer
acucccuguauaucugcca

SEQ ID NO: 539 - RNA, 19 nt, artificial
  Oligomer
gcaaagagaagugucagag

SEQ ID NO: 540 - RNA, 19 nt, artificial
  Oligomer
uccacugacaaccacaagu

SEQ ID NO: 541 - RNA, 19 nt, artificial
  Oligomer
gaucuuggagucaucuggg

SEQ ID NO: 542 - RNA, 19 nt, artificial
  Oligomer
gucugugggaaaagcaagc

SEQ ID NO: 543 - RNA, 19 nt, artificial
  Oligomer
acagucccuuucaaauugu

SEQ ID NO: 544 - RNA, 19 nt, artificial
  Oligomer
gagugggacucuuggaauc

SEQ ID NO: 545 - RNA, 19 nt, artificial
  Oligomer
agaaguguacauugauuuc

SEQ ID NO: 546 - RNA, 19 nt, artificial
  Oligomer
ucuaacuuggcaaaagacu

SEQ ID NO: 547 - RNA, 19 nt, artificial
  Oligomer
ccuauugacuaccuuaacc

SEQ ID NO: 548 - RNA, 19 nt, artificial
  Oligomer
aucacaagccuauugacua

SEQ ID NO: 549 - RNA, 19 nt, artificial
  Oligomer
ucuacaaaacagggcuacu

SEQ ID NO: 550 - RNA, 19 nt, artificial
  Oligomer
caucuuucacaccagcuac

SEQ ID NO: 551 - RNA, 19 nt, artificial
  Oligomer
aagaaagaaaaggccaauu

SEQ ID NO: 552 - RNA, 19 nt, artificial
  Oligomer
ccaaguccagaaccauagg

SEQ ID NO: 553 - RNA, 19 nt, artificial
  Oligomer
acucuaggcauuaaauacu

SEQ ID NO: 554 - RNA, 19 nt, artificial
  Oligomer
aacucuaggcauuaaauac

SEQ ID NO: 555 - RNA, 19 nt, artificial
  Oligomer
gaugugccaggauucuccu

SEQ ID NO: 556 - RNA, 19 nt, artificial
  Oligomer
acugacaaccacaagugga

SEQ ID NO: 557 - RNA, 19 nt, artificial
  Oligomer
uuggcaauuggaagcaucu

SEQ ID NO: 558 - RNA, 19 nt, artificial
  Oligomer
gugaagaauccaaggucug

SEQ ID NO: 559 - RNA, 19 nt, artificial
  Oligomer
aaagaacaagagugugaug

SEQ ID NO: 560 - RNA, 19 nt, artificial
  Oligomer
uaagcacacuuacauaagc

SEQ ID NO: 561 - RNA, 19 nt, artificial
  Oligomer
gcaguugcaauaaccuugg

SEQ ID NO: 562 - RNA, 19 nt, artificial
  Oligomer
cagugaacacagcaguugc

SEQ ID NO: 563 - RNA, 19 nt, artificial
  Oligomer
aaaucuacaaaacagggcu

SEQ ID NO: 564 - RNA, 19 nt, artificial
  Oligomer
cuggacccaucuuucacac

SEQ ID NO: 565 - RNA, 19 nt, artificial
  Oligomer
ucagcuaucuacuaggaag

SEQ ID NO: 566 - RNA, 19 nt, artificial
  Oligomer
agugcagcaaagagaagug

SEQ ID NO: 567 - RNA, 19 nt, artificial
  Oligomer
ugggaaaagcaagcgagca

SEQ ID NO: 568 - RNA, 19 nt, artificial
  Oligomer
aauugugaagaauccaagg

SEQ ID NO: 569 - RNA, 19 nt, artificial
  Oligomer
cugacaucccuaaugacag

SEQ ID NO: 570 - RNA, 19 nt, artificial
  Oligomer
caggagacaaagcuaccac

SEQ ID NO: 571 - RNA, 19 nt, artificial
  Oligomer
ggacucuuggaaucaggag

SEQ ID NO: 572 - RNA, 19 nt, artificial
  Oligomer
auaagcacacuuacauaag

SEQ ID NO: 573 - RNA, 19 nt, artificial
  Oligomer
uucaagauguggaaauucu

SEQ ID NO: 574 - RNA, 19 nt, artificial
  Oligomer
uaaacucuacaaauucccu

SEQ ID NO: 575 - RNA, 19 nt, artificial
  Oligomer
aaacagggcuacucucagg

SEQ ID NO: 576 - RNA, 19 nt, artificial
  Oligomer
agaaaucuacaaaacaggg

SEQ ID NO: 577 - RNA, 19 nt, artificial
  Oligomer
aaggucucuacaucacaga

SEQ ID NO: 578 - RNA, 19 nt, artificial
  Oligomer
cccaucuuucacaccagcu

SEQ ID NO: 579 - RNA, 19 nt, artificial
  Oligomer
agaaccauagggauuauug

SEQ ID NO: 580 - RNA, 19 nt, artificial
  Oligomer
aggaauuggcaaggugaug

SEQ ID NO: 581 - RNA, 19 nt, artificial
  Oligomer
ugauaucaacacuccacug

SEQ ID NO: 582 - RNA, 19 nt, artificial
  Oligomer
ugaucuuggagucaucugg

SEQ ID NO: 583 - RNA, 19 nt, artificial
  Oligomer
gaagaauccaaggucugug

SEQ ID NO: 584 - RNA, 19 nt, artificial
  Oligomer
acaguauugagaaaggcug

SEQ ID NO: 585 - RNA, 19 nt, artificial
  Oligomer
uacaguauugagaaaggcu

SEQ ID NO: 586 - RNA, 19 nt, artificial
  Oligomer
acauagagugggacucuug

SEQ ID NO: 587 - RNA, 19 nt, artificial
  Oligomer
uggcaaaagacuuauccuu

SEQ ID NO: 588 - RNA, 19 nt, artificial
  Oligomer
aagauguggaaauucuaac

SEQ ID NO: 589 - RNA, 19 nt, artificial
  Oligomer
ugguguaaaauucaagaug

SEQ ID NO: 590 - RNA, 19 nt, artificial
  Oligomer
uuggccuuuucuuucuucc

SEQ ID NO: 591 - RNA, 19 nt, artificial
  Oligomer
uugacuucugccaccuugc

SEQ ID NO: 592 - RNA, 19 nt, artificial
  Oligomer
uuucaaaauguaguguucc

SEQ ID NO: 593 - RNA, 19 nt, artificial
  Oligomer
uugcuuuucccacagaccu

SEQ ID NO: 594 - RNA, 19 nt, artificial
  Oligomer
uucuuuaaguuucucaagc

SEQ ID NO: 595 - RNA, 19 nt, artificial
  Oligomer
uaugguucuggacuuggcg

SEQ ID NO: 596 - RNA, 19 nt, artificial
  Oligomer
uuccguucuucuugacuuc

SEQ ID NO: 597 - RNA, 19 nt, artificial
  Oligomer
uuuucuuucuuccuaguag

SEQ ID NO: 598 - RNA, 19 nt, artificial
  Oligomer
uguuucuuccaucaccuug

SEQ ID NO: 599 - RNA, 19 nt, artificial
  Oligomer
uucucaauacuguagggcc

SEQ ID NO: 600 - RNA, 19 nt, artificial
  Oligomer
uuccaauugccaaacugug

SEQ ID NO: 601 - RNA, 19 nt, artificial
  Oligomer
uuuugaaugacauggacac

SEQ ID NO: 602 - RNA, 19 nt, artificial
  Oligomer
uuagcuuucuaauuaugcc

SEQ ID NO: 603 - RNA, 19 nt, artificial
  Oligomer
uuuuaguuccuucaggagg

SEQ ID NO: 604 - RNA, 19 nt, artificial
  Oligomer
uagcuuugucuccugauuc

SEQ ID NO: 605 - RNA, 19 nt, artificial
  Oligomer
uuggaaaucaauguacacu

SEQ ID NO: 606 - RNA, 19 nt, artificial
  Oligomer
uucucuuugcugcacuuga

SEQ ID NO: 607 - RNA, 19 nt, artificial
  Oligomer
uaggcuugugauuacccuc

SEQ ID NO: 608 - RNA, 19 nt, artificial
  Oligomer
uuuaaugccuagaguuuuc

SEQ ID NO: 609 - RNA, 19 nt, artificial
  Oligomer
uucaggaggaaagauacag

SEQ ID NO: 610 - RNA, 19 nt, artificial
  Oligomer
uuuaaguuucucaagcaga

SEQ ID NO: 611 - RNA, 19 nt, artificial
  Oligomer
uuucucaagcagaccagcc

SEQ ID NO: 612 - RNA, 19 nt, artificial
  Oligomer
uagaauuuccacaucuuga

SEQ ID NO: 613 - RNA, 19 nt, artificial
  Oligomer
uucaaaauguaguguuccc

SEQ ID NO: 614 - RNA, 19 nt, artificial
  Oligomer
uuugucuccugauuccaag

SEQ ID NO: 615 - RNA, 19 nt, artificial
  Oligomer
uuuuugaaugacauggaca

SEQ ID NO: 616 - RNA, 19 nt, artificial
  Oligomer
uuaaguuucucaagcagac

SEQ ID NO: 617 - RNA, 19 nt, artificial
  Oligomer
uugaauuuuacaccaagag

SEQ ID NO: 618 - RNA, 19 nt, artificial
  Oligomer
uugugauuacccucccgag

SEQ ID NO: 619 - RNA, 19 nt, artificial
  Oligomer
uuauaucuaauccugagag

SEQ ID NO: 620 - RNA, 19 nt, artificial
  Oligomer
ucaccuugccaauuccuag

SEQ ID NO: 621 - RNA, 19 nt, artificial
  Oligomer
auauacacaauauccuugg

SEQ ID NO: 622 - RNA, 19 nt, artificial
  Oligomer
uguccaugcaaguuuccac

SEQ ID NO: 623 - RNA, 19 nt, artificial
  Oligomer
uccguucuucuugacuucu

SEQ ID NO: 624 - RNA, 19 nt, artificial
  Oligomer
uugaaugacauggacacau

SEQ ID NO: 625 - RNA, 19 nt, artificial
  Oligomer
uacacuucucuuucuaagg

SEQ ID NO: 626 - RNA, 19 nt, artificial
  Oligomer
uuuucugaaagaacaaguc

SEQ ID NO: 627 - RNA, 19 nt, artificial
  Oligomer
uucugaaagaacaagucuu

SEQ ID NO: 628 - RNA, 19 nt, artificial
  Oligomer
uguaugucagaccucccac

SEQ ID NO: 629 - RNA, 19 nt, artificial
  Oligomer
aaucuuuccuuuuaguucc

SEQ ID NO: 630 - RNA, 19 nt, artificial
  Oligomer
uccugauuccaagaguccc

SEQ ID NO: 631 - RNA, 19 nt, artificial
  Oligomer
uuccuuuuaguuccuucag

SEQ ID NO: 632 - RNA, 19 nt, artificial
  Oligomer
uuugcugcacuugagcucu

SEQ ID NO: 633 - RNA, 19 nt, artificial
  Oligomer
uugagcucuccagucaguc

SEQ ID NO: 634 - RNA, 19 nt, artificial
  Oligomer
uuccacauuuacuuaggug

SEQ ID NO: 635 - RNA, 19 nt, artificial
  Oligomer
ucuccagucagucaacccu

SEQ ID NO: 636 - RNA, 19 nt, artificial
  Oligomer
uuccacuugugguugucag

SEQ ID NO: 637 - RNA, 19 nt, artificial
  Oligomer
guucuucuugacuucugcc

SEQ ID NO: 638 - RNA, 19 nt, artificial
  Oligomer
ucuucuugacuucugccac

SEQ ID NO: 639 - RNA, 19 nt, artificial
  Oligomer
uuagggaugucagcaaagg

SEQ ID NO: 640 - RNA, 19 nt, artificial
  Oligomer
aggcuugugauuacccucc

SEQ ID NO: 641 - RNA, 19 nt, artificial
  Oligomer
uagcuggugugaaagaugg

SEQ ID NO: 642 - RNA, 19 nt, artificial
  Oligomer
ucaggaggaaagauacagg

SEQ ID NO: 643 - RNA, 19 nt, artificial
  Oligomer
uucuucacaauuugaaagg

SEQ ID NO: 644 - RNA, 19 nt, artificial
  Oligomer
aauaggcuugugauuaccc

SEQ ID NO: 645 - RNA, 19 nt, artificial
  Oligomer
ucuucugugauguagagac

SEQ ID NO: 646 - RNA, 19 nt, artificial
  Oligomer
ucuguaugucagaccuccc

SEQ ID NO: 647 - RNA, 19 nt, artificial
  Oligomer
uuucuuccuaguagauagc

SEQ ID NO: 648 - RNA, 19 nt, artificial
  Oligomer
uuacuuagguggguuaagg

SEQ ID NO: 649 - RNA, 19 nt, artificial
  Oligomer
uccauuauaucuaauccug

SEQ ID NO: 650 - RNA, 19 nt, artificial
  Oligomer
uuucuuucuuccuaguaga

SEQ ID NO: 651 - RNA, 19 nt, artificial
  Oligomer
uagucuguccacuucaguc

SEQ ID NO: 652 - RNA, 19 nt, artificial
  Oligomer
ucucaagccaauauacaca

SEQ ID NO: 653 - RNA, 19 nt, artificial
  Oligomer
auccuuggcagauauacag

SEQ ID NO: 654 - RNA, 19 nt, artificial
  Oligomer
uccuuuuaguuccuucagg

SEQ ID NO: 655 - RNA, 19 nt, artificial
  Oligomer
uagggaugucagcaaaggg

SEQ ID NO: 656 - RNA, 19 nt, artificial
  Oligomer
ugaauuuuacaccaagagg

SEQ ID NO: 657 - RNA, 19 nt, artificial
  Oligomer
uucacuguucgaguuacuu

SEQ ID NO: 658 - RNA, 19 nt, artificial
  Oligomer
ugccaauuccuagucuguc

SEQ ID NO: 659 - RNA, 19 nt, artificial
  Oligomer
aauccuucacaucacacuc

SEQ ID NO: 660 - RNA, 19 nt, artificial
  Oligomer
uuucugaaagaacaagucu

SEQ ID NO: 661 - RNA, 19 nt, artificial
  Oligomer
uuuauaucggauguuucca

SEQ ID NO: 662 - RNA, 19 nt, artificial
  Oligomer
uccaucaccuugccaauuc

SEQ ID NO: 663 - RNA, 19 nt, artificial
  Oligomer
uccuagucuguccacuuca

SEQ ID NO: 664 - RNA, 19 nt, artificial
  Oligomer
uauccuuggcagauauaca

SEQ ID NO: 665 - RNA, 19 nt, artificial
  Oligomer
augugguagcuuugucucc

SEQ ID NO: 666 - RNA, 19 nt, artificial
  Oligomer
uccacauuuacuuaggugg

SEQ ID NO: 667 - RNA, 19 nt, artificial
  Oligomer
uaucuaauccugagaguag

SEQ ID NO: 668 - RNA, 19 nt, artificial
  Oligomer
uucucuguaugucagaccu

SEQ ID NO: 669 - RNA, 19 nt, artificial
  Oligomer
uuggcagauauacagggag

SEQ ID NO: 670 - RNA, 19 nt, artificial
  Oligomer
uuuaguuccuucaggagga

SEQ ID NO: 671 - RNA, 19 nt, artificial
  Oligomer
uacagguuguccaugcaag

SEQ ID NO: 672 - RNA, 19 nt, artificial
  Oligomer
ucuuccguucuucuugacu

SEQ ID NO: 673 - RNA, 19 nt, artificial
  Oligomer
cuuccguucuucuugacuu

SEQ ID NO: 674 - RNA, 19 nt, artificial
  Oligomer
uggaaaucaauguacacuu

SEQ ID NO: 675 - RNA, 19 nt, artificial
  Oligomer
augagauuuauaucggaug

SEQ ID NO: 676 - RNA, 19 nt, artificial
  Oligomer
uaauccugagaguagcccu

SEQ ID NO: 677 - RNA, 19 nt, artificial
  Oligomer
ugugauguagagaccuucu

SEQ ID NO: 678 - RNA, 19 nt, artificial
  Oligomer
uaugucagaccucccacga

SEQ ID NO: 679 - RNA, 19 nt, artificial
  Oligomer
uggaguguugauaucagug

SEQ ID NO: 680 - RNA, 19 nt, artificial
  Oligomer
uugccaaacuguggucucc

SEQ ID NO: 681 - RNA, 19 nt, artificial
  Oligomer
uuugaaagggacugucauu

SEQ ID NO: 682 - RNA, 19 nt, artificial
  Oligomer
auaauccuucacaucacac

SEQ ID NO: 683 - RNA, 19 nt, artificial
  Oligomer
uuccacaugugguagcuuu

SEQ ID NO: 684 - RNA, 19 nt, artificial
  Oligomer
ucucuuucuaaggauaagu

SEQ ID NO: 685 - RNA, 19 nt, artificial
  Oligomer
acaucuugaauuuuacacc

SEQ ID NO: 686 - RNA, 19 nt, artificial
  Oligomer
augaauuggccuuuucuuu

SEQ ID NO: 687 - RNA, 19 nt, artificial
  Oligomer
auuggccuuuucuuucuuc

SEQ ID NO: 688 - RNA, 19 nt, artificial
  Oligomer
agucagucaacccucagug

SEQ ID NO: 689 - RNA, 19 nt, artificial
  Oligomer
uugugguugucaguggagu

SEQ ID NO: 690 - RNA, 19 nt, artificial
  Oligomer
uugagaaaggagcuccaau

SEQ ID NO: 691 - RNA, 19 nt, artificial
  Oligomer
uguucgaguuacuucuucu

SEQ ID NO: 692 - RNA, 19 nt, artificial
  Oligomer
ucuaauccugagaguagcc

SEQ ID NO: 693 - RNA, 19 nt, artificial
  Oligomer
uccgucaacaucaaaacuu

SEQ ID NO: 694 - RNA, 19 nt, artificial
  Oligomer
aaaacuuagaugaauuggc

SEQ ID NO: 695 - RNA, 19 nt, artificial
  Oligomer
uacacaauauccuuggcag

SEQ ID NO: 696 - RNA, 19 nt, artificial
  Oligomer
uuuuacaccaagagggaau

SEQ ID NO: 697 - RNA, 19 nt, artificial
  Oligomer
auuucuucugugauguaga

SEQ ID NO: 698 - RNA, 19 nt, artificial
  Oligomer
uugccaauuccuagucugu

SEQ ID NO: 699 - RNA, 19 nt, artificial
  Oligomer
auuccuagucuguccacuu

SEQ ID NO: 700 - RNA, 19 nt, artificial
  Oligomer
ugugguugucaguggagug

SEQ ID NO: 701 - RNA, 19 nt, artificial
  Oligomer
aaaggagcuccaauaaucc

SEQ ID NO: 702 - RNA, 19 nt, artificial
  Oligomer
uggugugaaagaugggucc

SEQ ID NO: 703 - RNA, 19 nt, artificial
  Oligomer
aucccuaugguucuggacu

SEQ ID NO: 704 - RNA, 19 nt, artificial
  Oligomer
uggcacaucgggaaucuuu

SEQ ID NO: 705 - RNA, 19 nt, artificial
  Oligomer
uuuccacuugugguuguca

SEQ ID NO: 706 - RNA, 19 nt, artificial
  Oligomer
uccaauugccaaacugugg

SEQ ID NO: 707 - RNA, 19 nt, artificial
  Oligomer
uuggauucuucacaauuug

SEQ ID NO: 708 - RNA, 19 nt, artificial
  Oligomer
uuuuuugaaugacauggac

SEQ ID NO: 709 - RNA, 19 nt, artificial
  Oligomer
aucaauguacacuucucuu

SEQ ID NO: 710 - RNA, 19 nt, artificial
  Oligomer
auaggcuugugauuacccu

SEQ ID NO: 711 - RNA, 19 nt, artificial
  Oligomer
ucgaguuacuucuucuggu

SEQ ID NO: 712 - RNA, 19 nt, artificial
  Oligomer
aucuaauccugagaguagc

SEQ ID NO: 713 - RNA, 19 nt, artificial
  Oligomer
aauccugagaguagcccug

SEQ ID NO: 714 - RNA, 19 nt, artificial
  Oligomer
cuuuccuuuuaguuccuuc

SEQ ID NO: 715 - RNA, 19 nt, artificial
  Oligomer
ucucuuugcugcacuugag

SEQ ID NO: 716 - RNA, 19 nt, artificial
  Oligomer
cuugcuuuucccacagacc

SEQ ID NO: 717 - RNA, 19 nt, artificial
  Oligomer
aaagggacugucauuaggg

SEQ ID NO: 718 - RNA, 19 nt, artificial
  Oligomer
uuagaaggauaacucuaug

SEQ ID NO: 719 - RNA, 19 nt, artificial
  Oligomer
cuugugauuacccucccga

SEQ ID NO: 720 - RNA, 19 nt, artificial
  Oligomer
ucugacacuucucuuugcu

SEQ ID NO: 721 - RNA, 19 nt, artificial
  Oligomer
uucuugacuucugccaccu

SEQ ID NO: 722 - RNA, 19 nt, artificial
  Oligomer
ucuuccaucaccuugccaa

SEQ ID NO: 723 - RNA, 19 nt, artificial
  Oligomer
ugcaaguuuccacuugugg

SEQ ID NO: 724 - RNA, 19 nt, artificial
  Oligomer
ucgcuugcuuuucccacag

SEQ ID NO: 725 - RNA, 19 nt, artificial
  Oligomer
auuagggaugucagcaaag

SEQ ID NO: 726 - RNA, 19 nt, artificial
  Oligomer
uagaaggauaacucuaugc

SEQ ID NO: 727 - RNA, 19 nt, artificial
  Oligomer
auugcaacugcuguguuca

SEQ ID NO: 728 - RNA, 19 nt, artificial
  Oligomer
cugugauguagagaccuuc

SEQ ID NO: 729 - RNA, 19 nt, artificial
  Oligomer
aucaccuugccaauuccua

SEQ ID NO: 730 - RNA, 19 nt, artificial
  Oligomer
ucucucaagccaauauaca

SEQ ID NO: 731 - RNA, 19 nt, artificial
  Oligomer
cguucuucuugacuucugc

SEQ ID NO: 732 - RNA, 19 nt, artificial
  Oligomer
uuugaaugacauggacaca

SEQ ID NO: 733 - RNA, 19 nt, artificial
  Oligomer
ugugguagcuuugucuccu

SEQ ID NO: 734 - RNA, 19 nt, artificial
  Oligomer
aagucuuuugccaaguuag

SEQ ID NO: 735 - RNA, 19 nt, artificial
  Oligomer
ucuuuugccaaguuagaaa

SEQ ID NO: 736 - RNA, 19 nt, artificial
  Oligomer
uccacaucuugaauuuuac

SEQ ID NO: 737 - RNA, 19 nt, artificial
  Oligomer
ugaaagaacaagucuuuag

SEQ ID NO: 738 - RNA, 19 nt, artificial
  Oligomer
ugagaguagcccuguuuug

SEQ ID NO: 739 - RNA, 19 nt, artificial
  Oligomer
ucuuucuuccuaguagaua

SEQ ID NO: 740 - RNA, 19 nt, artificial
  Oligomer
augcucugacacuucucuu

SEQ ID NO: 741 - RNA, 19 nt, artificial
  Oligomer
uuguccaugcaaguuucca

SEQ ID NO: 742 - RNA, 19 nt, artificial
  Oligomer
uuagguggguuaagguagu

SEQ ID NO: 743 - RNA, 19 nt, artificial
  Oligomer
cuuccauuauaucuaaucc

SEQ ID NO: 744 - RNA, 19 nt, artificial
  Oligomer
uucugugauguagagaccu

SEQ ID NO: 745 - RNA, 19 nt, artificial
  Oligomer
uggccuuuucuuucuuccu

SEQ ID NO: 746 - RNA, 19 nt, artificial
  Oligomer
uagcugaguguuucuucca

SEQ ID NO: 747 - RNA, 19 nt, artificial
  Oligomer
uuucuuccaucaccuugcc

SEQ ID NO: 748 - RNA, 19 nt, artificial
  Oligomer
uuccaucaccuugccaauu

SEQ ID NO: 749 - RNA, 19 nt, artificial
  Oligomer
ccguucuucuugacuucug

SEQ ID NO: 750 - RNA, 19 nt, artificial
  Oligomer
uuucccacagaccuuggau

SEQ ID NO: 751 - RNA, 19 nt, artificial
  Oligomer
uucacaucacacucuuguu

SEQ ID NO: 752 - RNA, 19 nt, artificial
  Oligomer
acugcuguguucacuguuc

SEQ ID NO: 753 - RNA, 19 nt, artificial
  Oligomer
cuucucuguaugucagacc

SEQ ID NO: 754 - RNA, 19 nt, artificial
  Oligomer
ucucuguaugucagaccuc

SEQ ID NO: 755 - RNA, 19 nt, artificial
  Oligomer
uucuuccuaguagauagcu

SEQ ID NO: 756 - RNA, 19 nt, artificial
  Oligomer
uuccuaguagauagcugag

SEQ ID NO: 757 - RNA, 19 nt, artificial
  Oligomer
ucccacagaccuuggauuc

SEQ ID NO: 758 - RNA, 19 nt, artificial
  Oligomer
uugcugcacuugagcucuc

SEQ ID NO: 759 - RNA, 19 nt, artificial
  Oligomer
ucucaauacuguagggccu

SEQ ID NO: 760 - RNA, 19 nt, artificial
  Oligomer
agaacaagucuuuagaagg

SEQ ID NO: 761 - RNA, 19 nt, artificial
  Oligomer
aagguagucaauaggcuug

SEQ ID NO: 762 - RNA, 19 nt, artificial
  Oligomer
auuacccucccgagcaagu

SEQ ID NO: 763 - RNA, 19 nt, artificial
  Oligomer
guucacuuccauuauaucu

SEQ ID NO: 764 - RNA, 19 nt, artificial
  Oligomer
guccaguccgucaacauca

SEQ ID NO: 765 - RNA, 19 nt, artificial
  Oligomer
ccaauaaucccuaugguuc

SEQ ID NO: 766 - RNA, 19 nt, artificial
  Oligomer
uuagaugaauuggccuuuu

SEQ ID NO: 767 - RNA, 19 nt, artificial
  Oligomer
cuuucuuccuaguagauag

SEQ ID NO: 768 - RNA, 19 nt, artificial
  Oligomer
ugaguguuucuuccaucac

SEQ ID NO: 769 - RNA, 19 nt, artificial
  Oligomer
ugagcauccacccagauga

SEQ ID NO: 770 - RNA, 19 nt, artificial
  Oligomer
auucuuccguucuucuuga

SEQ ID NO: 771 - RNA, 19 nt, artificial
  Oligomer
uucccacagaccuuggauu

SEQ ID NO: 772 - RNA, 19 nt, artificial
  Oligomer
uucucuuucuaaggauaag

SEQ ID NO: 773 - RNA, 19 nt, artificial
  Oligomer
aucggauguuuccacauuu

SEQ ID NO: 774 - RNA, 19 nt, artificial
  Oligomer
agcaaguccgaaacaagcc

SEQ ID NO: 775 - RNA, 19 nt, artificial
  Oligomer
cugcuguguucacuguucg

SEQ ID NO: 776 - RNA, 19 nt, artificial
  Oligomer
auccuucacaucacacucu

SEQ ID NO: 777 - RNA, 19 nt, artificial
  Oligomer
aaguuucucaagcagacca

SEQ ID NO: 778 - RNA, 19 nt, artificial
  Oligomer
ugacauggacacauaguac

SEQ ID NO: 779 - RNA, 19 nt, artificial
  Oligomer
cuuauuuuuaaugccagca

SEQ ID NO: 780 - RNA, 19 nt, artificial
  Oligomer
ucuugaauuuuacaccaag

SEQ ID NO: 781 - RNA, 19 nt, artificial
  Oligomer
uuuacuuagguggguuaag

SEQ ID NO: 782 - RNA, 19 nt, artificial
  Oligomer
aagguuauugcaacugcug

SEQ ID NO: 783 - RNA, 19 nt, artificial
  Oligomer
uugcaacugcuguguucac

SEQ ID NO: 784 - RNA, 19 nt, artificial
  Oligomer
ugauguagagaccuucucu

SEQ ID NO: 785 - RNA, 19 nt, artificial
  Oligomer
uguagagaccuucucugua

SEQ ID NO: 786 - RNA, 19 nt, artificial
  Oligomer
cuggugugaaagauggguc

SEQ ID NO: 787 - RNA, 19 nt, artificial
  Oligomer
ugugaaagauggguccagu

SEQ ID NO: 788 - RNA, 19 nt, artificial
  Oligomer
ugcucugacacuucucuuu

SEQ ID NO: 789 - RNA, 19 nt, artificial
  Oligomer
uucacaauuugaaagggac

SEQ ID NO: 790 - RNA, 19 nt, artificial
  Oligomer
ucucaagcagaccagccuu

SEQ ID NO: 791 - RNA, 19 nt, artificial
  Oligomer
uccacaugugguagcuuug

SEQ ID NO: 792 - RNA, 19 nt, artificial
  Oligomer
auuggaaaucaauguacac

SEQ ID NO: 793 - RNA, 19 nt, artificial
  Oligomer
ugucccuuugagaaaggag

SEQ ID NO: 794 - RNA, 19 nt, artificial
  Oligomer
uggguuaagguagucaaua

SEQ ID NO: 795 - RNA, 19 nt, artificial
  Oligomer
uuaagguagucaauaggcu

SEQ ID NO: 796 - RNA, 19 nt, artificial
  Oligomer
cacuguucgaguuacuucu

SEQ ID NO: 797 - RNA, 19 nt, artificial
  Oligomer
agaugaauuggccuuuucu

SEQ ID NO: 798 - RNA, 19 nt, artificial
  Oligomer
ucuuccuaguagauagcug

SEQ ID NO: 799 - RNA, 19 nt, artificial
  Oligomer
aaguauuuaaugccuagag

SEQ ID NO: 800 - RNA, 19 nt, artificial
  Oligomer
agauacagguuguccaugc

SEQ ID NO: 801 - RNA, 19 nt, artificial
  Oligomer
auugccaaacuguggucuc

SEQ ID NO: 802 - RNA, 19 nt, artificial
  Oligomer
agaccuuggauucuucaca

SEQ ID NO: 803 - RNA, 19 nt, artificial
  Oligomer
ucacaauuugaaagggacu

SEQ ID NO: 804 - RNA, 19 nt, artificial
  Oligomer
auuugaaagggacugucau

SEQ ID NO: 805 - RNA, 19 nt, artificial
  Oligomer
cauuuuuugaaugacaugg

SEQ ID NO: 806 - RNA, 19 nt, artificial
  Oligomer
ucaauacuguagggccuuc

SEQ ID NO: 807 - RNA, 19 nt, artificial
  Oligomer
augccauuaacuaugagau

SEQ ID NO: 808 - RNA, 19 nt, artificial
  Oligomer
guucgaguuacuucuucug

SEQ ID NO: 809 - RNA, 19 nt, artificial
  Oligomer
uccaauaaucccuaugguu

SEQ ID NO: 810 - RNA, 19 nt, artificial
  Oligomer
uucuuccaucaccuugcca

SEQ ID NO: 811 - RNA, 19 nt, artificial
  Oligomer
uccacgucucucaagccaa

SEQ ID NO: 812 - RNA, 19 nt, artificial
  Oligomer
uucuggacuuggcgcucau

SEQ ID NO: 813 - RNA, 19 nt, artificial
  Oligomer
auaguaccuuuccacaugu

SEQ ID NO: 814 - RNA, 19 nt, artificial
  Oligomer
uuuacaccaagagggaauu

SEQ ID NO: 815 - RNA, 19 nt, artificial
  Oligomer
uacuuagguggguuaaggu

SEQ ID NO: 816 - RNA, 19 nt, artificial
  Oligomer
aauuccuagucuguccacu

SEQ ID NO: 817 - RNA, 19 nt, artificial
  Oligomer
auauccuuggcagauauac

SEQ ID NO: 818 - RNA, 19 nt, artificial
  Oligomer
uccuuggcagauauacagg

SEQ ID NO: 819 - RNA, 19 nt, artificial
  Oligomer
uugauaucagugugagcau

SEQ ID NO: 820 - RNA, 19 nt, artificial
  Oligomer
cuucucuuugcugcacuug

SEQ ID NO: 821 - RNA, 19 nt, artificial
  Oligomer
uccuucacaucacacucuu

SEQ ID NO: 822 - RNA, 19 nt, artificial
  Oligomer
cucuuguucuuuaaguuuc

SEQ ID NO: 823 - RNA, 19 nt, artificial
  Oligomer
ucuuuaaguuucucaagca

SEQ ID NO: 824 - RNA, 19 nt, artificial
  Oligomer
ccuuucucaauacuguagg

SEQ ID NO: 825 - RNA, 19 nt, artificial
  Oligomer
cacaucuugaauuuuacac

SEQ ID NO: 826 - RNA, 19 nt, artificial
  Oligomer
acuaugagauuuauaucgg

SEQ ID NO: 827 - RNA, 19 nt, artificial
  Oligomer
uuuccacauuuacuuaggu

SEQ ID NO: 828 - RNA, 19 nt, artificial
  Oligomer
uagauuucuucugugaugu

SEQ ID NO: 829 - RNA, 19 nt, artificial
  Oligomer
augccuagaguuuucaaaa

SEQ ID NO: 830 - RNA, 19 nt, artificial
  Oligomer
gccaauauacacaauaucc

SEQ ID NO: 831 - RNA, 19 nt, artificial
  Oligomer
gaugacuccaagaucaggg

SEQ ID NO: 832 - RNA, 19 nt, artificial
  Oligomer
ugcuuuucccacagaccuu

SEQ ID NO: 833 - RNA, 19 nt, artificial
  Oligomer
ugaaagggacugucauuag

SEQ ID NO: 834 - RNA, 19 nt, artificial
  Oligomer
uugucuccugauuccaaga

SEQ ID NO: 835 - RNA, 19 nt, artificial
  Oligomer
ucuccugauuccaagaguc

SEQ ID NO: 836 - RNA, 19 nt, artificial
  Oligomer
agucccacucuauguaugg

SEQ ID NO: 837 - RNA, 19 nt, artificial
  Oligomer
aguuagaauuuccacaucu

SEQ ID NO: 838 - RNA, 19 nt, artificial
  Oligomer
uaucggauguuuccacauu

SEQ ID NO: 839 - RNA, 19 nt, artificial
  Oligomer
cuguguucacuguucgagu

SEQ ID NO: 840 - RNA, 19 nt, artificial
  Oligomer
auccugagaguagcccugu

SEQ ID NO: 841 - RNA, 19 nt, artificial
  Oligomer
uguagauuucuucugugau

SEQ ID NO: 842 - RNA, 19 nt, artificial
  Oligomer
cucuguaugucagaccucc

SEQ ID NO: 843 - RNA, 19 nt, artificial
  Oligomer
cuaugguucuggacuuggc

SEQ ID NO: 844 - RNA, 19 nt, artificial
  Oligomer
aguuccuucaggaggaaag

SEQ ID NO: 845 - RNA, 19 nt, artificial
  Oligomer
guccaugcaaguuuccacu

SEQ ID NO: 846 - RNA, 19 nt, artificial
  Oligomer
uucuuccguucuucuugac

SEQ ID NO: 847 - RNA, 19 nt, artificial
  Oligomer
cuuuucccacagaccuugg

SEQ ID NO: 848 - RNA, 19 nt, artificial
  Oligomer
auggacacauaguaccuuu

SEQ ID NO: 849 - RNA, 19 nt, artificial
  Oligomer
gugugcuuauuuuuaaugc

SEQ ID NO: 850 - RNA, 19 nt, artificial
  Oligomer
ugugcuuauuuuuaaugcc

SEQ ID NO: 851 - RNA, 19 nt, artificial
  Oligomer
auguacacuucucuuucua

SEQ ID NO: 852 - RNA, 19 nt, artificial
  Oligomer
guacacuucucuuucuaag

SEQ ID NO: 853 - RNA, 19 nt, artificial
  Oligomer
uaagguagucaauaggcuu

SEQ ID NO: 854 - RNA, 19 nt, artificial
  Oligomer
uguucacuguucgaguuac

SEQ ID NO: 855 - RNA, 19 nt, artificial
  Oligomer
uuacuucuucuggugucuu

SEQ ID NO: 856 - RNA, 19 nt, artificial
  Oligomer
aaggagcuccaauaauccc

SEQ ID NO: 857 - RNA, 19 nt, artificial
  Oligomer
uccagucagucaacccuca

SEQ ID NO: 858 - RNA, 19 nt, artificial
  Oligomer
cuugccaauuccuagucug

SEQ ID NO: 859 - RNA, 19 nt, artificial
  Oligomer
uaucagugugagcauccac

SEQ ID NO: 860 - RNA, 19 nt, artificial
  Oligomer
cugauucuuccguucuucu

SEQ ID NO: 861 - RNA, 19 nt, artificial
  Oligomer
ucuuugcugcacuugagcu

SEQ ID NO: 862 - RNA, 19 nt, artificial
  Oligomer
ugcacuugagcucuccagu

SEQ ID NO: 863 - RNA, 19 nt, artificial
  Oligomer
aucacacucuuguucuuua

SEQ ID NO: 864 - RNA, 19 nt, artificial
  Oligomer
ucagucaacccucagugac

SEQ ID NO: 865 - RNA, 19 nt, artificial
  Oligomer
ccagccuuucucaauacug

SEQ ID NO: 866 - RNA, 19 nt, artificial
  Oligomer
ugagcucuccagucaguca

SEQ ID NO: 867 - RNA, 19 nt, artificial
  Oligomer
uaguaccuuuccacaugug

SEQ ID NO: 868 - RNA, 19 nt, artificial
  Oligomer
aguaccuuuccacaugugg

SEQ ID NO: 869 - RNA, 19 nt, artificial
  Oligomer
uaccuuuccacauguggua

SEQ ID NO: 870 - RNA, 19 nt, artificial
  Oligomer
uuuccacaugugguagcuu

SEQ ID NO: 871 - RNA, 19 nt, artificial
  Oligomer
uuaugccauuaacuaugag

SEQ ID NO: 872 - RNA, 19 nt, artificial
  Oligomer
gagcaaguccgaaacaagc

SEQ ID NO: 873 - RNA, 19 nt, artificial
  Oligomer
uucuucugugauguagaga

SEQ ID NO: 874 - RNA, 19 nt, artificial
  Oligomer
aguguuucuuccaucaccu

SEQ ID NO: 875 - RNA, 19 nt, artificial
  Oligomer
cucucaagccaauauacac

SEQ ID NO: 876 - RNA, 19 nt, artificial
  Oligomer
uggauucuucacaauuuga

SEQ ID NO: 877 - RNA, 19 nt, artificial
  Oligomer
cccauaauccuucacauca

SEQ ID NO: 878 - RNA, 19 nt, artificial
  Oligomer
uuccaagagucccacucua

SEQ ID NO: 879 - RNA, 19 nt, artificial
  Oligomer
cuuagguggguuaagguag

SEQ ID NO: 880 - RNA, 19 nt, artificial
  Oligomer
aacugcuguguucacuguu

SEQ ID NO: 881 - RNA, 19 nt, artificial
  Oligomer
aggagcuccaauaaucccu

SEQ ID NO: 882 - RNA, 19 nt, artificial
  Oligomer
agcuccaauaaucccuaug

SEQ ID NO: 883 - RNA, 19 nt, artificial
  Oligomer
aucgggaaucuuuccuuuu

SEQ ID NO: 884 - RNA, 19 nt, artificial
  Oligomer
ucgggaaucuuuccuuuua

SEQ ID NO: 885 - RNA, 19 nt, artificial
  Oligomer
cugacacuucucuuugcug

SEQ ID NO: 886 - RNA, 19 nt, artificial
  Oligomer
ugauaucagugugagcauc

SEQ ID NO: 887 - RNA, 19 nt, artificial
  Oligomer
augcuuccaauugccaaac

SEQ ID NO: 888 - RNA, 19 nt, artificial
  Oligomer
cuuccaauugccaaacugu

SEQ ID NO: 889 - RNA, 19 nt, artificial
  Oligomer
agcaccaggcugauucuuc

SEQ ID NO: 890 - RNA, 19 nt, artificial
  Oligomer
accaggcugauucuuccgu

SEQ ID NO: 891 - RNA, 19 nt, artificial
  Oligomer
uccaagagucccacucuau

SEQ ID NO: 892 - RNA, 19 nt, artificial
  Oligomer
ccaagagucccacucuaug

SEQ ID NO: 893 - RNA, 19 nt, artificial
  Oligomer
ugcuuauuuuuaaugccag

SEQ ID NO: 894 - RNA, 19 nt, artificial
  Oligomer
cucuuucuaaggauaaguc

SEQ ID NO: 895 - RNA, 19 nt, artificial
  Oligomer
uagagaccuucucuguaug

SEQ ID NO: 896 - RNA, 19 nt, artificial
  Oligomer
acuuagaugaauuggccuu

SEQ ID NO: 897 - RNA, 19 nt, artificial
  Oligomer
cugaguguuucuuccauca

SEQ ID NO: 898 - RNA, 19 nt, artificial
  Oligomer
auacagguuguccaugcaa

SEQ ID NO: 899 - RNA, 19 nt, artificial
  Oligomer
cagagaugcuuccaauugc

SEQ ID NO: 900 - RNA, 19 nt, artificial
  Oligomer
cuucuugacuucugccacc

SEQ ID NO: 901 - RNA, 19 nt, artificial
  Oligomer
cauaguaccuuuccacaug

SEQ ID NO: 902 - RNA, 19 nt, artificial
  Oligomer
auuccaagagucccacucu

SEQ ID NO: 903 - RNA, 19 nt, artificial
  Oligomer
ucccuuugagaaaggagcu

SEQ ID NO: 904 - RNA, 19 nt, artificial
  Oligomer
uuugagaaaggagcuccaa

SEQ ID NO: 905 - RNA, 19 nt, artificial
  Oligomer
ugcaacugcuguguucacu

SEQ ID NO: 906 - RNA, 19 nt, artificial
  Oligomer
auaucuaauccugagagua

SEQ ID NO: 907 - RNA, 19 nt, artificial
  Oligomer
gcuccaauaaucccuaugg

SEQ ID NO: 908 - RNA, 19 nt, artificial
  Oligomer
aacuuagaugaauuggccu

SEQ ID NO: 909 - RNA, 19 nt, artificial
  Oligomer
acuucagucauugaaaagu

SEQ ID NO: 910 - RNA, 19 nt, artificial
  Oligomer
uauacacaauauccuuggc

SEQ ID NO: 911 - RNA, 19 nt, artificial
  Oligomer
aagauacagguuguccaug

SEQ ID NO: 912 - RNA, 19 nt, artificial
  Oligomer
gcucugacacuucucuuug

SEQ ID NO: 913 - RNA, 19 nt, artificial
  Oligomer
uguugauaucagugugagc

SEQ ID NO: 914 - RNA, 19 nt, artificial
  Oligomer
aguuucucaagcagaccag

SEQ ID NO: 915 - RNA, 19 nt, artificial
  Oligomer
uggacacauaguaccuuuc

SEQ ID NO: 916 - RNA, 19 nt, artificial
  Oligomer
uguacacuucucuuucuaa

SEQ ID NO: 917 - RNA, 19 nt, artificial
  Oligomer
cuuucuaaggauaagucuu

SEQ ID NO: 918 - RNA, 19 nt, artificial
  Oligomer
gucccuuugagaaaggagc

SEQ ID NO: 919 - RNA, 19 nt, artificial
  Oligomer
uagguggguuaagguaguc

SEQ ID NO: 920 - RNA, 19 nt, artificial
  Oligomer
uagcccuguuuuguagauu

SEQ ID NO: 921 - RNA, 19 nt, artificial
  Oligomer
ucuuuccuuuuaguuccuu

SEQ ID NO: 922 - RNA, 19 nt, artificial
  Oligomer
aaguuuccacuugugguug

SEQ ID NO: 923 - RNA, 19 nt, artificial
  Oligomer
auccacccagaugacucca

SEQ ID NO: 924 - RNA, 19 nt, artificial
  Oligomer
agcugcucgcuugcuuuuc

SEQ ID NO: 925 - RNA, 19 nt, artificial
  Oligomer
cucgcuugcuuuucccaca

SEQ ID NO: 926 - RNA, 19 nt, artificial
  Oligomer
gcuuuucccacagaccuug

SEQ ID NO: 927 - RNA, 19 nt, artificial
  Oligomer
acagaccuuggauucuuca

SEQ ID NO: 928 - RNA, 19 nt, artificial
  Oligomer
aaugacauggacacauagu

SEQ ID NO: 929 - RNA, 19 nt, artificial
  Oligomer
aagaacaagucuuuagaag

SEQ ID NO: 930 - RNA, 19 nt, artificial
  Oligomer
gucuuuagaaggauaacuc

SEQ ID NO: 931 - RNA, 19 nt, artificial
  Oligomer
ugcuguguucacuguucga

SEQ ID NO: 932 - RNA, 19 nt, artificial
  Oligomer
uauaucuaauccugagagu

SEQ ID NO: 933 - RNA, 19 nt, artificial
  Oligomer
cugagaguagcccuguuuu

SEQ ID NO: 934 - RNA, 19 nt, artificial
  Oligomer
cuuagaugaauuggccuuu

SEQ ID NO: 935 - RNA, 19 nt, artificial
  Oligomer
aaugccuagaguuuucaaa

SEQ ID NO: 936 - RNA, 19 nt, artificial
  Oligomer
auauacagggagucaccca

SEQ ID NO: 937 - RNA, 19 nt, artificial
  Oligomer
caugcucugacacuucucu

SEQ ID NO: 938 - RNA, 19 nt, artificial
  Oligomer
uccuucaggaggaaagaua

SEQ ID NO: 939 - RNA, 19 nt, artificial
  Oligomer
ugguugucaguggaguguu

SEQ ID NO: 940 - RNA, 19 nt, artificial
  Oligomer
guugauaucagugugagca

SEQ ID NO: 941 - RNA, 19 nt, artificial
  Oligomer
cacaauuugaaagggacug

SEQ ID NO: 942 - RNA, 19 nt, artificial
  Oligomer
ucugaaagaacaagucuuu

SEQ ID NO: 943 - RNA, 19 nt, artificial
  Oligomer
aguccgaaacaagccaagg

SEQ ID NO: 944 - RNA, 19 nt, artificial
  Oligomer
agguuauugcaacugcugu

SEQ ID NO: 945 - RNA, 19 nt, artificial
  Oligomer
aguuacuucuucugguguc

SEQ ID NO: 946 - RNA, 19 nt, artificial
  Oligomer
gugaaagauggguccaguc

SEQ ID NO: 947 - RNA, 19 nt, artificial
  Oligomer
uagauagcugaguguuucu

SEQ ID NO: 948 - RNA, 19 nt, artificial
  Oligomer
gcugaguguuucuuccauc

SEQ ID NO: 949 - RNA, 19 nt, artificial
  Oligomer
ucccuaugguucuggacuu

SEQ ID NO: 950 - RNA, 19 nt, artificial
  Oligomer
gccaauuccuagucugucc

SEQ ID NO: 951 - RNA, 19 nt, artificial
  Oligomer
agccaauauacacaauauc

SEQ ID NO: 952 - RNA, 19 nt, artificial
  Oligomer
ggcacaucgggaaucuuuc

SEQ ID NO: 953 - RNA, 19 nt, artificial
  Oligomer
uccaugcaaguuuccacuu

SEQ ID NO: 954 - RNA, 19 nt, artificial
  Oligomer
agaugacuccaagaucagg

SEQ ID NO: 955 - RNA, 19 nt, artificial
  Oligomer
uuuucccacagaccuugga

SEQ ID NO: 956 - RNA, 19 nt, artificial
  Oligomer
augacauggacacauagua

SEQ ID NO: 957 - RNA, 19 nt, artificial
  Oligomer
acauaguaccuuuccacau

SEQ ID NO: 958 - RNA, 19 nt, artificial
  Oligomer
gauaacucuaugcuuaaga

SEQ ID NO: 959 - RNA, 19 nt, artificial
  Oligomer
ugagauuuauaucggaugu

SEQ ID NO: 960 - RNA, 19 nt, artificial
  Oligomer
guuuccacauuuacuuagg

SEQ ID NO: 961 - RNA, 19 nt, artificial
  Oligomer
agguggguuaagguaguca

SEQ ID NO: 962 - RNA, 19 nt, artificial
  Oligomer
guuaagguagucaauaggc

SEQ ID NO: 963 - RNA, 19 nt, artificial
  Oligomer
gcuguguucacuguucgag

SEQ ID NO: 964 - RNA, 19 nt, artificial
  Oligomer
uccugagaguagcccuguu

SEQ ID NO: 965 - RNA, 19 nt, artificial
  Oligomer
uuucuucugugauguagag

SEQ ID NO: 966 - RNA, 19 nt, artificial
  Oligomer
aguccgucaacaucaaaac

SEQ ID NO: 967 - RNA, 19 nt, artificial
  Oligomer
caaaacuuagaugaauugg

SEQ ID NO: 968 - RNA, 19 nt, artificial
  Oligomer
aauaaucccuaugguucug

SEQ ID NO: 969 - RNA, 19 nt, artificial
  Oligomer
uaaugccuagaguuuucaa

SEQ ID NO: 970 - RNA, 19 nt, artificial
  Oligomer
ccaauauacacaauauccu

SEQ ID NO: 971 - RNA, 19 nt, artificial
  Oligomer
cagauauacagggagucac

SEQ ID NO: 972 - RNA, 19 nt, artificial
  Oligomer
gauaucagugugagcaucc

SEQ ID NO: 973 - RNA, 19 nt, artificial
  Oligomer
auggccagagaugcuucca

SEQ ID NO: 974 - RNA, 19 nt, artificial
  Oligomer
ccagagaugcuuccaauug

SEQ ID NO: 975 - RNA, 19 nt, artificial
  Oligomer
aauugccaaacuguggucu

SEQ ID NO: 976 - RNA, 19 nt, artificial
  Oligomer
gcugauucuuccguucuuc

SEQ ID NO: 977 - RNA, 19 nt, artificial
  Oligomer
cacaucacacucuuguucu

SEQ ID NO: 978 - RNA, 19 nt, artificial
  Oligomer
acuugagcucuccagucag

SEQ ID NO: 979 - RNA, 19 nt, artificial
  Oligomer
cuuuaaguuucucaagcag

SEQ ID NO: 980 - RNA, 19 nt, artificial
  Oligomer
accuugccaauuccuaguc

SEQ ID NO: 981 - RNA, 19 nt, artificial
  Oligomer
cucaugcucugacacuucu

SEQ ID NO: 982 - RNA, 19 nt, artificial
  Oligomer
auaucagugugagcaucca

SEQ ID NO: 983 - RNA, 19 nt, artificial
  Oligomer
cucuuugcugcacuugagc

SEQ ID NO: 984 - RNA, 19 nt, artificial
  Oligomer
ugucuccugauuccaagag

SEQ ID NO: 985 - RNA, 19 nt, artificial
  Oligomer
cugauuccaagagucccac

SEQ ID NO: 986 - RNA, 19 nt, artificial
  Oligomer
auaucggauguuuccacau

SEQ ID NO: 987 - RNA, 19 nt, artificial
  Oligomer
ucggauguuuccacauuua

SEQ ID NO: 988 - RNA, 19 nt, artificial
  Oligomer
aaguccgaaacaagccaag

SEQ ID NO: 989 - RNA, 19 nt, artificial
  Oligomer
uguguucacuguucgaguu

SEQ ID NO: 990 - RNA, 19 nt, artificial
  Oligomer
gauguagagaccuucucug

SEQ ID NO: 991 - RNA, 19 nt, artificial
  Oligomer
gaugaauuggccuuuucuu

SEQ ID NO: 992 - RNA, 19 nt, artificial
  Oligomer
cuugugguugucaguggag

SEQ ID NO: 993 - RNA, 19 nt, artificial
  Oligomer
agaccagccuuucucaaua

SEQ ID NO: 994 - RNA, 19 nt, artificial
  Oligomer
cacauaguaccuuuccaca

SEQ ID NO: 995 - RNA, 19 nt, artificial
  Oligomer
gaauuuuacaccaagaggg

SEQ ID NO: 996 - RNA, 19 nt, artificial
  Oligomer
uuacaccaagagggaauuu

SEQ ID NO: 997 - RNA, 19 nt, artificial
  Oligomer
ccuuugagaaaggagcucc

SEQ ID NO: 998 - RNA, 19 nt, artificial
  Oligomer
uccgaaacaagccaagguu

SEQ ID NO: 999 - RNA, 19 nt, artificial
  Oligomer
gaaaggagcuccaauaauc

SEQ ID NO: 1000 - RNA, 19 nt, artificial
  Oligomer
gucaacaucaaaacuuaga

SEQ ID NO: 1001 - RNA, 19 nt, artificial
  Oligomer
cuuuucuuucuuccuagua

SEQ ID NO: 1002 - RNA, 19 nt, artificial
  Oligomer
aguagauagcugaguguuu

SEQ ID NO: 1003 - RNA, 19 nt, artificial
  Oligomer
agauauacagggagucacc

SEQ ID NO: 1004 - RNA, 19 nt, artificial
  Oligomer
aucuuuccuuuuaguuccu

SEQ ID NO: 1005 - RNA, 19 nt, artificial
  Oligomer
ggaggaaagauacagguug

SEQ ID NO: 1006 - RNA, 19 nt, artificial
  Oligomer
augcaaguuuccacuugug

SEQ ID NO: 1007 - RNA, 19 nt, artificial
  Oligomer
guugucaguggaguguuga

SEQ ID NO: 1008 - RNA, 19 nt, artificial
  Oligomer
agagaugcuuccaauugcc

SEQ ID NO: 1009 - RNA, 19 nt, artificial
  Oligomer
ucuugacuucugccaccuu

SEQ ID NO: 1010 - RNA, 19 nt, artificial
  Oligomer
accaagagggaauuuguag

SEQ ID NO: 1011 - RNA, 19 nt, artificial
  Oligomer
cauuauaucuaauccugag

SEQ ID NO: 1012 - RNA, 19 nt, artificial
  Oligomer
agaguagcccuguuuugua

SEQ ID NO: 1013 - RNA, 19 nt, artificial
  Oligomer
auguagagaccuucucugu

SEQ ID NO: 1014 - RNA, 19 nt, artificial
  Oligomer
gccuuuucuuucuuccuag

SEQ ID NO: 1015 - RNA, 19 nt, artificial
  Oligomer
gaguguuucuuccaucacc

SEQ ID NO: 1016 - RNA, 19 nt, artificial
  Oligomer
cuguccacuucagucauug

SEQ ID NO: 1017 - RNA, 19 nt, artificial
  Oligomer
acagguuguccaugcaagu

SEQ ID NO: 1018 - RNA, 19 nt, artificial
  Oligomer
aguggaguguugauaucag

SEQ ID NO: 1019 - RNA, 19 nt, artificial
  Oligomer
uccacccagaugacuccaa

SEQ ID NO: 1020 - RNA, 19 nt, artificial
  Oligomer
ucuucacaauuugaaaggg

SEQ ID NO: 1021 - RNA, 19 nt, artificial
  Oligomer
guuucucaagcagaccagc

SEQ ID NO: 1022 - RNA, 19 nt, artificial
  Oligomer
cacaugugguagcuuuguc

SEQ ID NO: 1023 - RNA, 19 nt, artificial
  Oligomer
ccugauuccaagaguccca

SEQ ID NO: 1024 - RNA, 19 nt, artificial
  Oligomer
auaagucuuuugccaaguu

SEQ ID NO: 1025 - RNA, 19 nt, artificial
  Oligomer
acaccaagagggaauuugu

SEQ ID NO: 1026 - RNA, 19 nt, artificial
  Oligomer
agucuuuagaaggauaacu

SEQ ID NO: 1027 - RNA, 19 nt, artificial
  Oligomer
cucuaugcuuaagaaaaug

SEQ ID NO: 1028 - RNA, 19 nt, artificial
  Oligomer
gguuauugcaacugcugug

SEQ ID NO: 1029 - RNA, 19 nt, artificial
  Oligomer
uuauugcaacugcuguguu

SEQ ID NO: 1030 - RNA, 19 nt, artificial
  Oligomer
gagaguagcccuguuuugu

SEQ ID NO: 1031 - RNA, 19 nt, artificial
  Oligomer
cuguaugucagaccuccca

SEQ ID NO: 1032 - RNA, 19 nt, artificial
  Oligomer
caguccgucaacaucaaaa

SEQ ID NO: 1033 - RNA, 19 nt, artificial
  Oligomer
ccuaguagauagcugagug

SEQ ID NO: 1034 - RNA, 19 nt, artificial
  Oligomer
uaguagauagcugaguguu

SEQ ID NO: 1035 - RNA, 19 nt, artificial
  Oligomer
caccuugccaauuccuagu

SEQ ID NO: 1036 - RNA, 19 nt, artificial
  Oligomer
uguccacuucagucauuga

SEQ ID NO: 1037 - RNA, 19 nt, artificial
  Oligomer
uccacuucagucauugaaa

SEQ ID NO: 1038 - RNA, 19 nt, artificial
  Oligomer
uggcagauauacagggagu

SEQ ID NO: 1039 - RNA, 19 nt, artificial
  Oligomer
cucugacacuucucuuugc

SEQ ID NO: 1040 - RNA, 19 nt, artificial
  Oligomer
acuugugguugucagugga

SEQ ID NO: 1041 - RNA, 19 nt, artificial
  Oligomer
cccagaugacuccaagauc

SEQ ID NO: 1042 - RNA, 19 nt, artificial
  Oligomer
gcuugcuuuucccacagac

SEQ ID NO: 1043 - RNA, 19 nt, artificial
  Oligomer
acaauuugaaagggacugu

SEQ ID NO: 1044 - RNA, 19 nt, artificial
  Oligomer
gauuccaagagucccacuc

SEQ ID NO: 1045 - RNA, 19 nt, artificial
  Oligomer
gaaaucaauguacacuucu

SEQ ID NO: 1046 - RNA, 19 nt, artificial
  Oligomer
agucuuuugccaaguuaga

SEQ ID NO: 1047 - RNA, 19 nt, artificial
  Oligomer
gguuaagguagucaauagg

SEQ ID NO: 1048 - RNA, 19 nt, artificial
  Oligomer
uagucaauaggcuugugau

SEQ ID NO: 1049 - RNA, 19 nt, artificial
  Oligomer
aguagcccuguuuuguaga

SEQ ID NO: 1050 - RNA, 19 nt, artificial
  Oligomer
guagcuggugugaaagaug

SEQ ID NO: 1051 - RNA, 19 nt, artificial
  Oligomer
aauuggccuuuucuuucuu

SEQ ID NO: 1052 - RNA, 19 nt, artificial
  Oligomer
ccuaugguucuggacuugg

SEQ ID NO: 1053 - RNA, 19 nt, artificial
  Oligomer
aguauuuaaugccuagagu

SEQ ID NO: 1054 - RNA, 19 nt, artificial
  Oligomer
guauuuaaugccuagaguu

SEQ ID NO: 1055 - RNA, 19 nt, artificial
  Oligomer
aggagaauccuggcacauc

SEQ ID NO: 1056 - RNA, 19 nt, artificial
  Oligomer
uccacuugugguugucagu

SEQ ID NO: 1057 - RNA, 19 nt, artificial
  Oligomer
agaugcuuccaauugccaa

SEQ ID NO: 1058 - RNA, 19 nt, artificial
  Oligomer
cagaccuuggauucuucac

SEQ ID NO: 1059 - RNA, 19 nt, artificial
  Oligomer
caucacacucuuguucuuu

SEQ ID NO: 1060 - RNA, 19 nt, artificial
  Oligomer
gcuuauguaagugugcuua

SEQ ID NO: 1061 - RNA, 19 nt, artificial
  Oligomer
ccaagguuauugcaacugc

SEQ ID NO: 1062 - RNA, 19 nt, artificial
  Oligomer
gcaacugcuguguucacug

SEQ ID NO: 1063 - RNA, 19 nt, artificial
  Oligomer
agcccuguuuuguagauuu

SEQ ID NO: 1064 - RNA, 19 nt, artificial
  Oligomer
gugugaaagauggguccag

SEQ ID NO: 1065 - RNA, 19 nt, artificial
  Oligomer
cuuccuaguagauagcuga

SEQ ID NO: 1066 - RNA, 19 nt, artificial
  Oligomer
cacuucucuuugcugcacu

SEQ ID NO: 1067 - RNA, 19 nt, artificial
  Oligomer
ugcucgcuugcuuuuccca

SEQ ID NO: 1068 - RNA, 19 nt, artificial
  Oligomer
ccuuggauucuucacaauu

SEQ ID NO: 1069 - RNA, 19 nt, artificial
  Oligomer
cugucauuagggaugucag

SEQ ID NO: 1070 - RNA, 19 nt, artificial
  Oligomer
gugguagcuuugucuccug

SEQ ID NO: 1071 - RNA, 19 nt, artificial
  Oligomer
cuccugauuccaagagucc

SEQ ID NO: 1072 - RNA, 19 nt, artificial
  Oligomer
cuuauguaagugugcuuau

SEQ ID NO: 1073 - RNA, 19 nt, artificial
  Oligomer
agaauuuccacaucuugaa

SEQ ID NO: 1074 - RNA, 19 nt, artificial
  Oligomer
agggaauuuguagaguuua

SEQ ID NO: 1075 - RNA, 19 nt, artificial
  Oligomer
ccugagaguagcccuguuu

SEQ ID NO: 1076 - RNA, 19 nt, artificial
  Oligomer
cccuguuuuguagauuucu

SEQ ID NO: 1077 - RNA, 19 nt, artificial
  Oligomer
ucugugauguagagaccuu

SEQ ID NO: 1078 - RNA, 19 nt, artificial
  Oligomer
agcuggugugaaagauggg

SEQ ID NO: 1079 - RNA, 19 nt, artificial
  Oligomer
caauaaucccuaugguucu

SEQ ID NO: 1080 - RNA, 19 nt, artificial
  Oligomer
caucaccuugccaauuccu

SEQ ID NO: 1081 - RNA, 19 nt, artificial
  Oligomer
caguggaguguugauauca

SEQ ID NO: 1082 - RNA, 19 nt, artificial
  Oligomer
ccagaugacuccaagauca

SEQ ID NO: 1083 - RNA, 19 nt, artificial
  Oligomer
cacagaccuuggauucuuc

SEQ ID NO: 1084 - RNA, 19 nt, artificial
  Oligomer
cagccuuucucaauacugu

SEQ ID NO: 1085 - RNA, 19 nt, artificial
  Oligomer
agccuuucucaauacugua

SEQ ID NO: 1086 - RNA, 19 nt, artificial
  Oligomer
caagagucccacucuaugu

SEQ ID NO: 1087 - RNA, 19 nt, artificial
  Oligomer
aaggauaagucuuuugcca

SEQ ID NO: 1088 - RNA, 19 nt, artificial
  Oligomer
guuagaauuuccacaucuu

SEQ ID NO: 1089 - RNA, 19 nt, artificial
  Oligomer
caucuugaauuuuacacca

SEQ ID NO: 1090 - RNA, 19 nt, artificial
  Oligomer
ccaguuugccggauacaaa

SEQ ID NO: 1091 - RNA, 19 nt, artificial
  Oligomer
gggcuuagaucauuccuca

SEQ ID NO: 1092 - RNA, 19 nt, artificial
  Oligomer
ucuggagguucgacgugaa

SEQ ID NO: 1093 - RNA, 19 nt, artificial
  Oligomer
cuuuggcagugccauguaa

SEQ ID NO: 1094 - RNA, 19 nt, artificial
  Oligomer
ccuauuggauccaaaacua

SEQ ID NO: 1095 - RNA, 19 nt, artificial
  Oligomer
cgcucauguacccuaugua

SEQ ID NO: 1096 - RNA, 19 nt, artificial
  Oligomer
cauucaucuuccaaggcca

SEQ ID NO: 1097 - RNA, 19 nt, artificial
  Oligomer
gaugcguggagagucgaaa

SEQ ID NO: 1098 - RNA, 19 nt, artificial
  Oligomer
ucaccuauuggauccaaaa

SEQ ID NO: 1099 - RNA, 19 nt, artificial
  Oligomer
agaugcguggagagucgaa

SEQ ID NO: 1100 - RNA, 19 nt, artificial
  Oligomer
cuggguaaggaguacucga

SEQ ID NO: 1101 - RNA, 19 nt, artificial
  Oligomer
ccuucacuuuccuggguaa

SEQ ID NO: 1102 - RNA, 19 nt, artificial
  Oligomer
ccucgaacuuugacagcga

SEQ ID NO: 1103 - RNA, 19 nt, artificial
  Oligomer
cuaccaccucgaacuuuga

SEQ ID NO: 1104 - RNA, 19 nt, artificial
  Oligomer
cuuccaguaccgagagaaa

SEQ ID NO: 1105 - RNA, 19 nt, artificial
  Oligomer
gaugggaaguacuggcgau

SEQ ID NO: 1106 - RNA, 19 nt, artificial
  Oligomer
cgaacuuugacagcgacaa

SEQ ID NO: 1107 - RNA, 19 nt, artificial
  Oligomer
ccaccacaacaucaccuau

SEQ ID NO: 1108 - RNA, 19 nt, artificial
  Oligomer
agcuggacucggucuuuga

SEQ ID NO: 1109 - RNA, 19 nt, artificial
  Oligomer
acggcaaugcugaugggaa

SEQ ID NO: 1110 - RNA, 19 nt, artificial
  Oligomer
agaccugggcagauuccaa

SEQ ID NO: 1111 - RNA, 19 nt, artificial
  Oligomer
ggagugaguugaaccaggu

SEQ ID NO: 1112 - RNA, 19 nt, artificial
  Oligomer
cucgguuuggaaacgcaga

SEQ ID NO: 1113 - RNA, 19 nt, artificial
  Oligomer
ucaaguggcaccaccacaa

SEQ ID NO: 1114 - RNA, 19 nt, artificial
  Oligomer
aggacgacgugaauggcau

SEQ ID NO: 1115 - RNA, 19 nt, artificial
  Oligomer
agcuguauuuguucaagga

SEQ ID NO: 1116 - RNA, 19 nt, artificial
  Oligomer
gcaacgugaacaucuucga

SEQ ID NO: 1117 - RNA, 19 nt, artificial
  Oligomer
guuccaacucgguuuggaa

SEQ ID NO: 1118 - RNA, 19 nt, artificial
  Oligomer
gauccaaaacuacucggaa

SEQ ID NO: 1119 - RNA, 19 nt, artificial
  Oligomer
gcagauuccaaaccuuuga

SEQ ID NO: 1120 - RNA, 19 nt, artificial
  Oligomer
gguauucuguucuggagga

SEQ ID NO: 1121 - RNA, 19 nt, artificial
  Oligomer
gccggauacaaacugguau

SEQ ID NO: 1122 - RNA, 19 nt, artificial
  Oligomer
guaccgagagaaagccuau

SEQ ID NO: 1123 - RNA, 19 nt, artificial
  Oligomer
auuuguucaaggaugggaa

SEQ ID NO: 1124 - RNA, 19 nt, artificial
  Oligomer
gccaguuugccggauacaa

SEQ ID NO: 1125 - RNA, 19 nt, artificial
  Oligomer
ccuuccuuaucgccgacaa

SEQ ID NO: 1126 - RNA, 19 nt, artificial
  Oligomer
ugcauaaggacgacgugaa

SEQ ID NO: 1127 - RNA, 19 nt, artificial
  Oligomer
gcuacgugaccuaugacau

SEQ ID NO: 1128 - RNA, 19 nt, artificial
  Oligomer
ugaacaucuucgacgccau

SEQ ID NO: 1129 - RNA, 19 nt, artificial
  Oligomer
guucccggagugaguugaa

SEQ ID NO: 1130 - RNA, 19 nt, artificial
  Oligomer
acgucuuccaguaccgaga

SEQ ID NO: 1131 - RNA, 19 nt, artificial
  Oligomer
ccggauacaaacugguauu

SEQ ID NO: 1132 - RNA, 19 nt, artificial
  Oligomer
guuuuuuguuggaguguuu

SEQ ID NO: 1133 - RNA, 19 nt, artificial
  Oligomer
cuuugacagcgacaagaag

SEQ ID NO: 1134 - RNA, 19 nt, artificial
  Oligomer
agauugggaaccagcugua

SEQ ID NO: 1135 - RNA, 19 nt, artificial
  Oligomer
acugguauucuguucugga

SEQ ID NO: 1136 - RNA, 19 nt, artificial
  Oligomer
ugccggauacaaacuggua

SEQ ID NO: 1137 - RNA, 19 nt, artificial
  Oligomer
aguacuggcgauucucuga

SEQ ID NO: 1138 - RNA, 19 nt, artificial
  Oligomer
gauacaguuuguuccucgu

SEQ ID NO: 1139 - RNA, 19 nt, artificial
  Oligomer
ugggcagauuccaaaccuu

SEQ ID NO: 1140 - RNA, 19 nt, artificial
  Oligomer
guauucuguucuggaggaa

SEQ ID NO: 1141 - RNA, 19 nt, artificial
  Oligomer
augcguggagagucgaaau

SEQ ID NO: 1142 - RNA, 19 nt, artificial
  Oligomer
uggagaccugagaaccaau

SEQ ID NO: 1143 - RNA, 19 nt, artificial
  Oligomer
gauugggaaccagcuguau

SEQ ID NO: 1144 - RNA, 19 nt, artificial
  Oligomer
aggaauaccuguaccgcua

SEQ ID NO: 1145 - RNA, 19 nt, artificial
  Oligomer
cgugguuccaacucgguuu

SEQ ID NO: 1146 - RNA, 19 nt, artificial
  Oligomer
gcugcuucuccagaagcaa

SEQ ID NO: 1147 - RNA, 19 nt, artificial
  Oligomer
gauacaaacugguauucug

SEQ ID NO: 1148 - RNA, 19 nt, artificial
  Oligomer
uuuggcagugccauguaaa

SEQ ID NO: 1149 - RNA, 19 nt, artificial
  Oligomer
ugaccuaugacauccugca

SEQ ID NO: 1150 - RNA, 19 nt, artificial
  Oligomer
aguaccgagagaaagccua

SEQ ID NO: 1151 - RNA, 19 nt, artificial
  Oligomer
gcuguauuuguucaaggau

SEQ ID NO: 1152 - RNA, 19 nt, artificial
  Oligomer
accuguaccgcuaugguua

SEQ ID NO: 1153 - RNA, 19 nt, artificial
  Oligomer
guuuccauucaucuuccaa

SEQ ID NO: 1154 - RNA, 19 nt, artificial
  Oligomer
aacucgguuuggaaacgca

SEQ ID NO: 1155 - RNA, 19 nt, artificial
  Oligomer
uuuguuggaguguuucuaa

SEQ ID NO: 1156 - RNA, 19 nt, artificial
  Oligomer
cuuuguuuuuuguuggagu

SEQ ID NO: 1157 - RNA, 19 nt, artificial
  Oligomer
cuguucuggaggaaaggga

SEQ ID NO: 1158 - RNA, 19 nt, artificial
  Oligomer
uauucuguucuggaggaaa

SEQ ID NO: 1159 - RNA, 19 nt, artificial
  Oligomer
auucaucuuccaaggccaa

SEQ ID NO: 1160 - RNA, 19 nt, artificial
  Oligomer
aagugggcuacgugaccua

SEQ ID NO: 1161 - RNA, 19 nt, artificial
  Oligomer
uggacucggucuuugagga

SEQ ID NO: 1162 - RNA, 19 nt, artificial
  Oligomer
cccuauguaccgcuucacu

SEQ ID NO: 1163 - RNA, 19 nt, artificial
  Oligomer
cuggcagaggaauaccugu

SEQ ID NO: 1164 - RNA, 19 nt, artificial
  Oligomer
ccaagaagcuuuucuucuu

SEQ ID NO: 1165 - RNA, 19 nt, artificial
  Oligomer
aggcgcucauguacccuau

SEQ ID NO: 1166 - RNA, 19 nt, artificial
  Oligomer
cuuuccuggguaaggagua

SEQ ID NO: 1167 - RNA, 19 nt, artificial
  Oligomer
aaguggcaccaccacaaca

SEQ ID NO: 1168 - RNA, 19 nt, artificial
  Oligomer
uuguuggaguguuucuaau

SEQ ID NO: 1169 - RNA, 19 nt, artificial
  Oligomer
gugaguugaaccaggugga

SEQ ID NO: 1170 - RNA, 19 nt, artificial
  Oligomer
ggcucuccaagaagcuuuu

SEQ ID NO: 1171 - RNA, 19 nt, artificial
  Oligomer
ggcuuagaucauuccucag

SEQ ID NO: 1172 - RNA, 19 nt, artificial
  Oligomer
acuuugacagcgacaagaa

SEQ ID NO: 1173 - RNA, 19 nt, artificial
  Oligomer
uguucuggaggaaagggag

SEQ ID NO: 1174 - RNA, 19 nt, artificial
  Oligomer
aguugaaccagguggacca

SEQ ID NO: 1175 - RNA, 19 nt, artificial
  Oligomer
gguuccaacucgguuugga

SEQ ID NO: 1176 - RNA, 19 nt, artificial
  Oligomer
aucaccuauuggauccaaa

SEQ ID NO: 1177 - RNA, 19 nt, artificial
  Oligomer
cguggagagucgaaaucuc

SEQ ID NO: 1178 - RNA, 19 nt, artificial
  Oligomer
gcuuuggcagugccaugua

SEQ ID NO: 1179 - RNA, 19 nt, artificial
  Oligomer
cgagagaaagccuauuucu

SEQ ID NO: 1180 - RNA, 19 nt, artificial
  Oligomer
accagcuguauuuguucaa

SEQ ID NO: 1181 - RNA, 19 nt, artificial
  Oligomer
cgcugggcuuagaucauuc

SEQ ID NO: 1182 - RNA, 19 nt, artificial
  Oligomer
cggaccaaggauacaguuu

SEQ ID NO: 1183 - RNA, 19 nt, artificial
  Oligomer
aaaacuacucggaagacuu

SEQ ID NO: 1184 - RNA, 19 nt, artificial
  Oligomer
caguuugccggauacaaac

SEQ ID NO: 1185 - RNA, 19 nt, artificial
  Oligomer
guugaaccagguggaccaa

SEQ ID NO: 1186 - RNA, 19 nt, artificial
  Oligomer
gccacuacugugccuuuga

SEQ ID NO: 1187 - RNA, 19 nt, artificial
  Oligomer
gccaguuuccauucaucuu

SEQ ID NO: 1188 - RNA, 19 nt, artificial
  Oligomer
gacgaugacgaguuguggu

SEQ ID NO: 1189 - RNA, 19 nt, artificial
  Oligomer
ggauccaaaacuacucgga

SEQ ID NO: 1190 - RNA, 19 nt, artificial
  Oligomer
aguccacccuugugcucuu

SEQ ID NO: 1191 - RNA, 19 nt, artificial
  Oligomer
ggcuacgugaccuaugaca

SEQ ID NO: 1192 - RNA, 19 nt, artificial
  Oligomer
uacccuauguaccgcuuca

SEQ ID NO: 1193 - RNA, 19 nt, artificial
  Oligomer
ccugccaguuuccauucau

SEQ ID NO: 1194 - RNA, 19 nt, artificial
  Oligomer
accuuuguuuuuuguugga

SEQ ID NO: 1195 - RNA, 19 nt, artificial
  Oligomer
cugguauucuguucuggag

SEQ ID NO: 1196 - RNA, 19 nt, artificial
  Oligomer
gcguggagagucgaaaucu

SEQ ID NO: 1197 - RNA, 19 nt, artificial
  Oligomer
acgaugccugcaacgugaa

SEQ ID NO: 1198 - RNA, 19 nt, artificial
  Oligomer
cucucuucucaccuuuguu

SEQ ID NO: 1199 - RNA, 19 nt, artificial
  Oligomer
ccagcuguauuuguucaag

SEQ ID NO: 1200 - RNA, 19 nt, artificial
  Oligomer
ucgguuuggaaacgcagau

SEQ ID NO: 1201 - RNA, 19 nt, artificial
  Oligomer
cggcucuccaagaagcuuu

SEQ ID NO: 1202 - RNA, 19 nt, artificial
  Oligomer
ggaaguacuggcgauucuc

SEQ ID NO: 1203 - RNA, 19 nt, artificial
  Oligomer
cuuccaaggccaauccuac

SEQ ID NO: 1204 - RNA, 19 nt, artificial
  Oligomer
acucgguuuggaaacgcag

SEQ ID NO: 1205 - RNA, 19 nt, artificial
  Oligomer
ccauuucgacgaugacgag

SEQ ID NO: 1206 - RNA, 19 nt, artificial
  Oligomer
cccauuucgacgaugacga

SEQ ID NO: 1207 - RNA, 19 nt, artificial
  Oligomer
acgcagacaucgucaucca

SEQ ID NO: 1208 - RNA, 19 nt, artificial
  Oligomer
caucaccuauuggauccaa

SEQ ID NO: 1209 - RNA, 19 nt, artificial
  Oligomer
gcagacaucgucauccagu

SEQ ID NO: 1210 - RNA, 19 nt, artificial
  Oligomer
acaacaucaccuauuggau

SEQ ID NO: 1211 - RNA, 19 nt, artificial
  Oligomer
accaccacaacaucaccua

SEQ ID NO: 1212 - RNA, 19 nt, artificial
  Oligomer
agugggcuacgugaccuau

SEQ ID NO: 1213 - RNA, 19 nt, artificial
  Oligomer
gagugaguugaaccaggug

SEQ ID NO: 1214 - RNA, 19 nt, artificial
  Oligomer
cuguauuuguucaaggaug

SEQ ID NO: 1215 - RNA, 19 nt, artificial
  Oligomer
gagauugggaaccagcugu

SEQ ID NO: 1216 - RNA, 19 nt, artificial
  Oligomer
cuucuacggccacuacugu

SEQ ID NO: 1217 - RNA, 19 nt, artificial
  Oligomer
aaacccugccaguuuccau

SEQ ID NO: 1218 - RNA, 19 nt, artificial
  Oligomer
gaaccaaucucaccgacag

SEQ ID NO: 1219 - RNA, 19 nt, artificial
  Oligomer
caaaacuacucggaagacu

SEQ ID NO: 1220 - RNA, 19 nt, artificial
  Oligomer
uuggcagugccauguaaau

SEQ ID NO: 1221 - RNA, 19 nt, artificial
  Oligomer
cgugaccuaugacauccug

SEQ ID NO: 1222 - RNA, 19 nt, artificial
  Oligomer
gaugccugcaacgugaaca

SEQ ID NO: 1223 - RNA, 19 nt, artificial
  Oligomer
gaggaauaccuguaccgcu

SEQ ID NO: 1224 - RNA, 19 nt, artificial
  Oligomer
ccggaccaaggauacaguu

SEQ ID NO: 1225 - RNA, 19 nt, artificial
  Oligomer
ccaccucgaacuuugacag

SEQ ID NO: 1226 - RNA, 19 nt, artificial
  Oligomer
gaguacucgaccuguacca

SEQ ID NO: 1227 - RNA, 19 nt, artificial
  Oligomer
gaccugagaaccaaucuca

SEQ ID NO: 1228 - RNA, 19 nt, artificial
  Oligomer
uccaaaccuuugagggcga

SEQ ID NO: 1229 - RNA, 19 nt, artificial
  Oligomer
ggcagauuccaaaccuuug

SEQ ID NO: 1230 - RNA, 19 nt, artificial
  Oligomer
caguaccgagagaaagccu

SEQ ID NO: 1231 - RNA, 19 nt, artificial
  Oligomer
aaggacgacgugaauggca

SEQ ID NO: 1232 - RNA, 19 nt, artificial
  Oligomer
cuugcauaaggacgacgug

SEQ ID NO: 1233 - RNA, 19 nt, artificial
  Oligomer
ucaccuucacucgcgugua

SEQ ID NO: 1234 - RNA, 19 nt, artificial
  Oligomer
ggaguguuucuaauaaacu

SEQ ID NO: 1235 - RNA, 19 nt, artificial
  Oligomer
agccaguuugccggauaca

SEQ ID NO: 1236 - RNA, 19 nt, artificial
  Oligomer
ccuaugacauccugcagug

SEQ ID NO: 1237 - RNA, 19 nt, artificial
  Oligomer
caaggaugggaaguacugg

SEQ ID NO: 1238 - RNA, 19 nt, artificial
  Oligomer
uauuggauccaaaacuacu

SEQ ID NO: 1239 - RNA, 19 nt, artificial
  Oligomer
uuuuguuggaguguuucua

SEQ ID NO: 1240 - RNA, 19 nt, artificial
  Oligomer
ggauacaaacugguauucu

SEQ ID NO: 1241 - RNA, 19 nt, artificial
  Oligomer
cuuagaucauuccucagug

SEQ ID NO: 1242 - RNA, 19 nt, artificial
  Oligomer
ucuuccaaggccaauccua

SEQ ID NO: 1243 - RNA, 19 nt, artificial
  Oligomer
cccugccaguuuccauuca

SEQ ID NO: 1244 - RNA, 19 nt, artificial
  Oligomer
cuauuggauccaaaacuac

SEQ ID NO: 1245 - RNA, 19 nt, artificial
  Oligomer
gaccuaugacauccugcag

SEQ ID NO: 1246 - RNA, 19 nt, artificial
  Oligomer
cagcuguauuuguucaagg

SEQ ID NO: 1247 - RNA, 19 nt, artificial
  Oligomer
ccuauguaccgcuucacug

SEQ ID NO: 1248 - RNA, 19 nt, artificial
  Oligomer
accaccucgaacuuugaca

SEQ ID NO: 1249 - RNA, 19 nt, artificial
  Oligomer
uuccaacucgguuuggaaa

SEQ ID NO: 1250 - RNA, 19 nt, artificial
  Oligomer
guggagagucgaaaucucu

SEQ ID NO: 1251 - RNA, 19 nt, artificial
  Oligomer
uguucaaggaugggaagua

SEQ ID NO: 1252 - RNA, 19 nt, artificial
  Oligomer
aaccagcuguauuuguuca

SEQ ID NO: 1253 - RNA, 19 nt, artificial
  Oligomer
ucgaacuuugacagcgaca

SEQ ID NO: 1254 - RNA, 19 nt, artificial
  Oligomer
cgcuaccaccucgaacuuu

SEQ ID NO: 1255 - RNA, 19 nt, artificial
  Oligomer
gguaaggaguacucgaccu

SEQ ID NO: 1256 - RNA, 19 nt, artificial
  Oligomer
ucacuuuccuggguaagga

SEQ ID NO: 1257 - RNA, 19 nt, artificial
  Oligomer
ucgugguuccaacucgguu

SEQ ID NO: 1258 - RNA, 19 nt, artificial
  Oligomer
acgcccauuucgacgauga

SEQ ID NO: 1259 - RNA, 19 nt, artificial
  Oligomer
acuuggauucucuaaccuu

SEQ ID NO: 1260 - RNA, 19 nt, artificial
  Oligomer
uguuuuuuguuggaguguu

SEQ ID NO: 1261 - RNA, 19 nt, artificial
  Oligomer
gcccucucuucucaccuuu

SEQ ID NO: 1262 - RNA, 19 nt, artificial
  Oligomer
acgugaccuaugacauccu

SEQ ID NO: 1263 - RNA, 19 nt, artificial
  Oligomer
cuuccuuaucgccgacaag

SEQ ID NO: 1264 - RNA, 19 nt, artificial
  Oligomer
uugcauaaggacgacguga

SEQ ID NO: 1265 - RNA, 19 nt, artificial
  Oligomer
uucccuggagaccugagaa

SEQ ID NO: 1266 - RNA, 19 nt, artificial
  Oligomer
agaaccaaucucaccgaca

SEQ ID NO: 1267 - RNA, 19 nt, artificial
  Oligomer
ugagaaccaaucucaccga

SEQ ID NO: 1268 - RNA, 19 nt, artificial
  Oligomer
aguggcaccaccacaacau

SEQ ID NO: 1269 - RNA, 19 nt, artificial
  Oligomer
uggaguguuucuaauaaac

SEQ ID NO: 1270 - RNA, 19 nt, artificial
  Oligomer
cucuucucaccuuuguuuu

SEQ ID NO: 1271 - RNA, 19 nt, artificial
  Oligomer
cccucucuucucaccuuug

SEQ ID NO: 1272 - RNA, 19 nt, artificial
  Oligomer
uggagagucgaaaucucug

SEQ ID NO: 1273 - RNA, 19 nt, artificial
  Oligomer
caaacugguauucuguucu

SEQ ID NO: 1274 - RNA, 19 nt, artificial
  Oligomer
gcuaugguuacacucgggu

SEQ ID NO: 1275 - RNA, 19 nt, artificial
  Oligomer
gcucauguacccuauguac

SEQ ID NO: 1276 - RNA, 19 nt, artificial
  Oligomer
aguuuccauucaucuucca

SEQ ID NO: 1277 - RNA, 19 nt, artificial
  Oligomer
ggcaaugcugaugggaaac

SEQ ID NO: 1278 - RNA, 19 nt, artificial
  Oligomer
auucuguucuggaggaaag

SEQ ID NO: 1279 - RNA, 19 nt, artificial
  Oligomer
aacccugccaguuuccauu

SEQ ID NO: 1280 - RNA, 19 nt, artificial
  Oligomer
agagacucuacacccagga

SEQ ID NO: 1281 - RNA, 19 nt, artificial
  Oligomer
gguuuggaaacgcagaugg

SEQ ID NO: 1282 - RNA, 19 nt, artificial
  Oligomer
cgguuuggaaacgcagaug

SEQ ID NO: 1283 - RNA, 19 nt, artificial
  Oligomer
uugugcucuucccuggaga

SEQ ID NO: 1284 - RNA, 19 nt, artificial
  Oligomer
caccuauuggauccaaaac

SEQ ID NO: 1285 - RNA, 19 nt, artificial
  Oligomer
accugagaaccaaucucac

SEQ ID NO: 1286 - RNA, 19 nt, artificial
  Oligomer
gcagugccauguaaauccc

SEQ ID NO: 1287 - RNA, 19 nt, artificial
  Oligomer
gagagaaagccuauuucug

SEQ ID NO: 1288 - RNA, 19 nt, artificial
  Oligomer
uaccgagagaaagccuauu

SEQ ID NO: 1289 - RNA, 19 nt, artificial
  Oligomer
gucuuccaguaccgagaga

SEQ ID NO: 1290 - RNA, 19 nt, artificial
  Oligomer
auugggaaccagcuguauu

SEQ ID NO: 1291 - RNA, 19 nt, artificial
  Oligomer
gccugcaacgugaacaucu

SEQ ID NO: 1292 - RNA, 19 nt, artificial
  Oligomer
cacuacugugccuuugagu

SEQ ID NO: 1293 - RNA, 19 nt, artificial
  Oligomer
uggguaaggaguacucgac

SEQ ID NO: 1294 - RNA, 19 nt, artificial
  Oligomer
uggcaccaccacaacauca

SEQ ID NO: 1295 - RNA, 19 nt, artificial
  Oligomer
aguucccggagugaguuga

SEQ ID NO: 1296 - RNA, 19 nt, artificial
  Oligomer
uguauuuguucaaggaugg

SEQ ID NO: 1297 - RNA, 19 nt, artificial
  Oligomer
aggaguacucgaccuguac

SEQ ID NO: 1298 - RNA, 19 nt, artificial
  Oligomer
cacuuuccuggguaaggag

SEQ ID NO: 1299 - RNA, 19 nt, artificial
  Oligomer
acaucaccuauuggaucca

SEQ ID NO: 1300 - RNA, 19 nt, artificial
  Oligomer
ugcugcuucuccagaagca

SEQ ID NO: 1301 - RNA, 19 nt, artificial
  Oligomer
aaguacuggcgauucucug

SEQ ID NO: 1302 - RNA, 19 nt, artificial
  Oligomer
caacgugaacaucuucgac

SEQ ID NO: 1303 - RNA, 19 nt, artificial
  Oligomer
ccuugcauaaggacgacgu

SEQ ID NO: 1304 - RNA, 19 nt, artificial
  Oligomer
ugggaaacccugccaguuu

SEQ ID NO: 1305 - RNA, 19 nt, artificial
  Oligomer
accuaugacauccugcagu

SEQ ID NO: 1306 - RNA, 19 nt, artificial
  Oligomer
ugaguucccggagugaguu

SEQ ID NO: 1307 - RNA, 19 nt, artificial
  Oligomer
auuucugccaggaccgcuu

SEQ ID NO: 1308 - RNA, 19 nt, artificial
  Oligomer
ccgagagaaagccuauuuc

SEQ ID NO: 1309 - RNA, 19 nt, artificial
  Oligomer
augccugcaacgugaacau

SEQ ID NO: 1310 - RNA, 19 nt, artificial
  Oligomer
agaucauuccucagugccg

SEQ ID NO: 1311 - RNA, 19 nt, artificial
  Oligomer
uaaggaguacucgaccugu

SEQ ID NO: 1312 - RNA, 19 nt, artificial
  Oligomer
accuucacucgcguguaca

SEQ ID NO: 1313 - RNA, 19 nt, artificial
  Oligomer
accuauuggauccaaaacu

SEQ ID NO: 1314 - RNA, 19 nt, artificial
  Oligomer
accgagagaaagccuauuu

SEQ ID NO: 1315 - RNA, 19 nt, artificial
  Oligomer
ucuccaagaagcuuuucuu

SEQ ID NO: 1316 - RNA, 19 nt, artificial
  Oligomer
augggaaguacuggcgauu

SEQ ID NO: 1317 - RNA, 19 nt, artificial
  Oligomer
ccuguaccgcuaugguuac

SEQ ID NO: 1318 - RNA, 19 nt, artificial
  Oligomer
aacuuugacagcgacaaga

SEQ ID NO: 1319 - RNA, 19 nt, artificial
  Oligomer
uuccaaggccaauccuacu

SEQ ID NO: 1320 - RNA, 19 nt, artificial
  Oligomer
gaaacccugccaguuucca

SEQ ID NO: 1321 - RNA, 19 nt, artificial
  Oligomer
caucgucauccaguuuggu

SEQ ID NO: 1322 - RNA, 19 nt, artificial
  Oligomer
gaaagccuauuucugccag

SEQ ID NO: 1323 - RNA, 19 nt, artificial
  Oligomer
agcuuuucuucuucucugg

SEQ ID NO: 1324 - RNA, 19 nt, artificial
  Oligomer
uucaaggaugggaaguacu

SEQ ID NO: 1325 - RNA, 19 nt, artificial
  Oligomer
uuuguucaaggaugggaag

SEQ ID NO: 1326 - RNA, 19 nt, artificial
  Oligomer
cuguaccgcuaugguuaca

SEQ ID NO: 1327 - RNA, 19 nt, artificial
  Oligomer
cccuucacuuuccugggua

SEQ ID NO: 1328 - RNA, 19 nt, artificial
  Oligomer
cugccaguuuccauucauc

SEQ ID NO: 1329 - RNA, 19 nt, artificial
  Oligomer
cugggcagauuccaaaccu

SEQ ID NO: 1330 - RNA, 19 nt, artificial
  Oligomer
gagaccugagaaccaaucu

SEQ ID NO: 1331 - RNA, 19 nt, artificial
  Oligomer
uccagaagcaacugucccu

SEQ ID NO: 1332 - RNA, 19 nt, artificial
  Oligomer
aagccuauuucugccagga

SEQ ID NO: 1333 - RNA, 19 nt, artificial
  Oligomer
agagaaagccuauuucugc

SEQ ID NO: 1334 - RNA, 19 nt, artificial
  Oligomer
ucuuccaguaccgagagaa

SEQ ID NO: 1335 - RNA, 19 nt, artificial
  Oligomer
aaugcugaugggaaacccu

SEQ ID NO: 1336 - RNA, 19 nt, artificial
  Oligomer
uccaaaacuacucggaaga

SEQ ID NO: 1337 - RNA, 19 nt, artificial
  Oligomer
ccugagaaccaaucucacc

SEQ ID NO: 1338 - RNA, 19 nt, artificial
  Oligomer
ccuuuguuuuuuguuggag

SEQ ID NO: 1339 - RNA, 19 nt, artificial
  Oligomer
aagcuuuucuucuucucug

SEQ ID NO: 1340 - RNA, 19 nt, artificial
  Oligomer
gaagcuuuucuucuucucu

SEQ ID NO: 1341 - RNA, 19 nt, artificial
  Oligomer
caguuuccauucaucuucc

SEQ ID NO: 1342 - RNA, 19 nt, artificial
  Oligomer
cgucauccaguuugguguc

SEQ ID NO: 1343 - RNA, 19 nt, artificial
  Oligomer
ggagagucgaaaucucugg

SEQ ID NO: 1344 - RNA, 19 nt, artificial
  Oligomer
ucuucucaccuuuguuuuu

SEQ ID NO: 1345 - RNA, 19 nt, artificial
  Oligomer
uucuggaggaaagggagga

SEQ ID NO: 1346 - RNA, 19 nt, artificial
  Oligomer
uauuuguucaaggauggga

SEQ ID NO: 1347 - RNA, 19 nt, artificial
  Oligomer
gaacaucuucgacgccauc

SEQ ID NO: 1348 - RNA, 19 nt, artificial
  Oligomer
cugcaacgugaacaucuuc

SEQ ID NO: 1349 - RNA, 19 nt, artificial
  Oligomer
agcuggcagaggaauaccu

SEQ ID NO: 1350 - RNA, 19 nt, artificial
  Oligomer
augggaaacccugccaguu

SEQ ID NO: 1351 - RNA, 19 nt, artificial
  Oligomer
cauuucgacgaugacgagu

SEQ ID NO: 1352 - RNA, 19 nt, artificial
  Oligomer
caccaccacaacaucaccu

SEQ ID NO: 1353 - RNA, 19 nt, artificial
  Oligomer
uaaacuuggauucucuaac

SEQ ID NO: 1354 - RNA, 19 nt, artificial
  Oligomer
uccaguaccgagagaaagc

SEQ ID NO: 1355 - RNA, 19 nt, artificial
  Oligomer
ggauacaguuuguuccucg

SEQ ID NO: 1356 - RNA, 19 nt, artificial
  Oligomer
uuugacagcgacaagaagu

SEQ ID NO: 1357 - RNA, 19 nt, artificial
  Oligomer
cucgaacuuugacagcgac

SEQ ID NO: 1358 - RNA, 19 nt, artificial
  Oligomer
guacuggcgauucucugag

SEQ ID NO: 1359 - RNA, 19 nt, artificial
  Oligomer
gaaccagcuguauuuguuc

SEQ ID NO: 1360 - RNA, 19 nt, artificial
  Oligomer
cauaaggacgacgugaaug

SEQ ID NO: 1361 - RNA, 19 nt, artificial
  Oligomer
ggcagaggaauaccuguac

SEQ ID NO: 1362 - RNA, 19 nt, artificial
  Oligomer
uuuccauucaucuuccaag

SEQ ID NO: 1363 - RNA, 19 nt, artificial
  Oligomer
ucgucauccaguuuggugu

SEQ ID NO: 1364 - RNA, 19 nt, artificial
  Oligomer
acaucgucauccaguuugg

SEQ ID NO: 1365 - RNA, 19 nt, artificial
  Oligomer
ccacaacaucaccuauugg

SEQ ID NO: 1366 - RNA, 19 nt, artificial
  Oligomer
auacaaacugguauucugu

SEQ ID NO: 1367 - RNA, 19 nt, artificial
  Oligomer
ugaguugaaccagguggac

SEQ ID NO: 1368 - RNA, 19 nt, artificial
  Oligomer
gugaacaucuucgacgcca

SEQ ID NO: 1369 - RNA, 19 nt, artificial
  Oligomer
uuugaguccgguggacgau

SEQ ID NO: 1370 - RNA, 19 nt, artificial
  Oligomer
uauguaccgcuucacugag

SEQ ID NO: 1371 - RNA, 19 nt, artificial
  Oligomer
ucauguacccuauguaccg

SEQ ID NO: 1372 - RNA, 19 nt, artificial
  Oligomer
acuuuccuggguaaggagu

SEQ ID NO: 1373 - RNA, 19 nt, artificial
  Oligomer
gacaagcucuucggcuucu

SEQ ID NO: 1374 - RNA, 19 nt, artificial
  Oligomer
ugguauucuguucuggagg

SEQ ID NO: 1375 - RNA, 19 nt, artificial
  Oligomer
caagaagcuuuucuucuuc

SEQ ID NO: 1376 - RNA, 19 nt, artificial
  Oligomer
uccuuaucgccgacaagug

SEQ ID NO: 1377 - RNA, 19 nt, artificial
  Oligomer
uacuggcgauucucugagg

SEQ ID NO: 1378 - RNA, 19 nt, artificial
  Oligomer
caaggauacaguuuguucc

SEQ ID NO: 1379 - RNA, 19 nt, artificial
  Oligomer
caacaucaccuauuggauc

SEQ ID NO: 1380 - RNA, 19 nt, artificial
  Oligomer
cagauuccaaaccuuugag

SEQ ID NO: 1381 - RNA, 19 nt, artificial
  Oligomer
accugggcagauuccaaac

SEQ ID NO: 1382 - RNA, 19 nt, artificial
  Oligomer
uuuuuguuggaguguuucu

SEQ ID NO: 1383 - RNA, 19 nt, artificial
  Oligomer
aucauuccucagugccgga

SEQ ID NO: 1384 - RNA, 19 nt, artificial
  Oligomer
cugggcuuagaucauuccu

SEQ ID NO: 1385 - RNA, 19 nt, artificial
  Oligomer
ugccaguuuccauucaucu

SEQ ID NO: 1386 - RNA, 19 nt, artificial
  Oligomer
guuuggaaacgcagauggc

SEQ ID NO: 1387 - RNA, 19 nt, artificial
  Oligomer
gagaaccaaucucaccgac

SEQ ID NO: 1388 - RNA, 19 nt, artificial
  Oligomer
caccuuuguuuuuuguugg

SEQ ID NO: 1389 - RNA, 19 nt, artificial
  Oligomer
uuccaguaccgagagaaag

SEQ ID NO: 1390 - RNA, 19 nt, artificial
  Oligomer
gcuuuucuucuucucuggg

SEQ ID NO: 1391 - RNA, 19 nt, artificial
  Oligomer
cucuccaagaagcuuuucu

SEQ ID NO: 1392 - RNA, 19 nt, artificial
  Oligomer
aaggaugggaaguacuggc

SEQ ID NO: 1393 - RNA, 19 nt, artificial
  Oligomer
ugggaaccagcuguauuug

SEQ ID NO: 1394 - RNA, 19 nt, artificial
  Oligomer
uaccuguaccgcuaugguu

SEQ ID NO: 1395 - RNA, 19 nt, artificial
  Oligomer
auaccuguaccgcuauggu

SEQ ID NO: 1396 - RNA, 19 nt, artificial
  Oligomer
uguacccuauguaccgcuu

SEQ ID NO: 1397 - RNA, 19 nt, artificial
  Oligomer
accaaggauacaguuuguu

SEQ ID NO: 1398 - RNA, 19 nt, artificial
  Oligomer
agaaagccuauuucugcca

SEQ ID NO: 1399 - RNA, 19 nt, artificial
  Oligomer
gagaaagccuauuucugcc

SEQ ID NO: 1400 - RNA, 19 nt, artificial
  Oligomer
cuaugguuacacucgggug

SEQ ID NO: 1401 - RNA, 19 nt, artificial
  Oligomer
ccauucaucuuccaaggcc

SEQ ID NO: 1402 - RNA, 19 nt, artificial
  Oligomer
ucgacgaugacgaguugug

SEQ ID NO: 1403 - RNA, 19 nt, artificial
  Oligomer
auucagggagacgcccauu

SEQ ID NO: 1404 - RNA, 19 nt, artificial
  Oligomer
auccaaaacuacucggaag

SEQ ID NO: 1405 - RNA, 19 nt, artificial
  Oligomer
guguuucuaauaaacuugg

SEQ ID NO: 1406 - RNA, 19 nt, artificial
  Oligomer
aguuugccggauacaaacu

SEQ ID NO: 1407 - RNA, 19 nt, artificial
  Oligomer
ggcagugccauguaaaucc

SEQ ID NO: 1408 - RNA, 19 nt, artificial
  Oligomer
gugaccuaugacauccugc

SEQ ID NO: 1409 - RNA, 19 nt, artificial
  Oligomer
guauuuguucaaggauggg

SEQ ID NO: 1410 - RNA, 19 nt, artificial
  Oligomer
acgugaacaucuucgacgc

SEQ ID NO: 1411 - RNA, 19 nt, artificial
  Oligomer
aaggauacaguuuguuccu

SEQ ID NO: 1412 - RNA, 19 nt, artificial
  Oligomer
uugacagcgacaagaagug

SEQ ID NO: 1413 - RNA, 19 nt, artificial
  Oligomer
uuccauucaucuuccaagg

SEQ ID NO: 1414 - RNA, 19 nt, artificial
  Oligomer
caaugcugaugggaaaccc

SEQ ID NO: 1415 - RNA, 19 nt, artificial
  Oligomer
uucagggagacgcccauuu

SEQ ID NO: 1416 - RNA, 19 nt, artificial
  Oligomer
ucucaccuuuguuuuuugu

SEQ ID NO: 1417 - RNA, 19 nt, artificial
  Oligomer
uacaaacugguauucuguu

SEQ ID NO: 1418 - RNA, 19 nt, artificial
  Oligomer
auuucgacgaugacgaguu

SEQ ID NO: 1419 - RNA, 19 nt, artificial
  Oligomer
ccaaaacuacucggaagac

SEQ ID NO: 1420 - RNA, 19 nt, artificial
  Oligomer
aaaccuuugagggcgaccu

SEQ ID NO: 1421 - RNA, 19 nt, artificial
  Oligomer
agauuccaaaccuuugagg

SEQ ID NO: 1422 - RNA, 19 nt, artificial
  Oligomer
uucuguucuggaggaaagg

SEQ ID NO: 1423 - RNA, 19 nt, artificial
  Oligomer
cuaugacauccugcagugc

SEQ ID NO: 1424 - RNA, 19 nt, artificial
  Oligomer
acaagcucuucggcuucug

SEQ ID NO: 1425 - RNA, 19 nt, artificial
  Oligomer
augcugaugggaaacccug

SEQ ID NO: 1426 - RNA, 19 nt, artificial
  Oligomer
ucuccagaagcaacugucc

SEQ ID NO: 1427 - RNA, 19 nt, artificial
  Oligomer
gcuucuccagaagcaacug

SEQ ID NO: 1428 - RNA, 19 nt, artificial
  Oligomer
ucaccuuuguuuuuuguug

SEQ ID NO: 1429 - RNA, 19 nt, artificial
  Oligomer
acuacugugccuuugaguc

SEQ ID NO: 1430 - RNA, 19 nt, artificial
  Oligomer
uaaggacgacgugaauggc

SEQ ID NO: 1431 - RNA, 19 nt, artificial
  Oligomer
auaaggacgacgugaaugg

SEQ ID NO: 1432 - RNA, 19 nt, artificial
  Oligomer
gugauugacgacgccuuug

SEQ ID NO: 1433 - RNA, 19 nt, artificial
  Oligomer
cugcuucuccagaagcaac

SEQ ID NO: 1434 - RNA, 19 nt, artificial
  Oligomer
uucccggagugaguugaac

SEQ ID NO: 1435 - RNA, 19 nt, artificial
  Oligomer
aagaagcuuuucuucuucu

SEQ ID NO: 1436 - RNA, 19 nt, artificial
  Oligomer
acccuauguaccgcuucac

SEQ ID NO: 1437 - RNA, 19 nt, artificial
  Oligomer
ugacagcgacaagaagugg

SEQ ID NO: 1438 - RNA, 19 nt, artificial
  Oligomer
caccucgaacuuugacagc

SEQ ID NO: 1439 - RNA, 19 nt, artificial
  Oligomer
cagaggaauaccuguaccg

SEQ ID NO: 1440 - RNA, 19 nt, artificial
  Oligomer
uuugagggcgaccucaagu

SEQ ID NO: 1441 - RNA, 19 nt, artificial
  Oligomer
gagagucgaaaucucuggg

SEQ ID NO: 1442 - RNA, 19 nt, artificial
  Oligomer
cuucucaccuuuguuuuuu

SEQ ID NO: 1443 - RNA, 19 nt, artificial
  Oligomer
aacugguauucuguucugg

SEQ ID NO: 1444 - RNA, 19 nt, artificial
  Oligomer
uugccggauacaaacuggu

SEQ ID NO: 1445 - RNA, 19 nt, artificial
  Oligomer
ugcguggagagucgaaauc

SEQ ID NO: 1446 - RNA, 19 nt, artificial
  Oligomer
ugggaaguacuggcgauuc

SEQ ID NO: 1447 - RNA, 19 nt, artificial
  Oligomer
gcagaggaauaccuguacc

SEQ ID NO: 1448 - RNA, 19 nt, artificial
  Oligomer
caacucgguuuggaaacgc

SEQ ID NO: 1449 - RNA, 19 nt, artificial
  Oligomer
gugguuccaacucgguuug

SEQ ID NO: 1450 - RNA, 19 nt, artificial
  Oligomer
augacgaguuguggucccu

SEQ ID NO: 1451 - RNA, 19 nt, artificial
  Oligomer
agaccugagaaccaaucuc

SEQ ID NO: 1452 - RNA, 19 nt, artificial
  Oligomer
agaagcuuuucuucuucuc

SEQ ID NO: 1453 - RNA, 19 nt, artificial
  Oligomer
cuccaagaagcuuuucuuc

SEQ ID NO: 1454 - RNA, 19 nt, artificial
  Oligomer
gcugggcuuagaucauucc

SEQ ID NO: 1455 - RNA, 19 nt, artificial
  Oligomer
acaguuuguuccucguggc

SEQ ID NO: 1456 - RNA, 19 nt, artificial
  Oligomer
uuuccuggguaaggaguac

SEQ ID NO: 1457 - RNA, 19 nt, artificial
  Oligomer
ccaacucgguuuggaaacg

SEQ ID NO: 1458 - RNA, 19 nt, artificial
  Oligomer
cuacugugccuuugagucc

SEQ ID NO: 1459 - RNA, 19 nt, artificial
  Oligomer
auguaccgcuucacugagg

SEQ ID NO: 1460 - RNA, 19 nt, artificial
  Oligomer
aguacucgaccuguaccag

SEQ ID NO: 1461 - RNA, 19 nt, artificial
  Oligomer
gauuccaaaccuuugaggg

SEQ ID NO: 1462 - RNA, 19 nt, artificial
  Oligomer
ugcuucuccagaagcaacu

SEQ ID NO: 1463 - RNA, 19 nt, artificial
  Oligomer
agccuauuucugccaggac

SEQ ID NO: 1464 - RNA, 19 nt, artificial
  Oligomer
aaagccuauuucugccagg

SEQ ID NO: 1465 - RNA, 19 nt, artificial
  Oligomer
gaagaugcugcuguucagc

SEQ ID NO: 1466 - RNA, 19 nt, artificial
  Oligomer
cuuuucuucuucucugggc

SEQ ID NO: 1467 - RNA, 19 nt, artificial
  Oligomer
uuagaucauuccucagugc

SEQ ID NO: 1468 - RNA, 19 nt, artificial
  Oligomer
cauguacccuauguaccgc

SEQ ID NO: 1469 - RNA, 19 nt, artificial
  Oligomer
guaaggaguacucgaccug

SEQ ID NO: 1470 - RNA, 19 nt, artificial
  Oligomer
aaccaaucucaccgacagg

SEQ ID NO: 1471 - RNA, 19 nt, artificial
  Oligomer
aacuuggauucucuaaccu

SEQ ID NO: 1472 - RNA, 19 nt, artificial
  Oligomer
ugcuuuggcagugccaugu

SEQ ID NO: 1473 - RNA, 19 nt, artificial
  Oligomer
uucuacuggcgcgugaguu

SEQ ID NO: 1474 - RNA, 19 nt, artificial
  Oligomer
cuucuccagaagcaacugu

SEQ ID NO: 1475 - RNA, 19 nt, artificial
  Oligomer
uucucaccuuuguuuuuug

SEQ ID NO: 1476 - RNA, 19 nt, artificial
  Oligomer
uccaagaagcuuuucuucu

SEQ ID NO: 1477 - RNA, 19 nt, artificial
  Oligomer
uacugugccuuugaguccg

SEQ ID NO: 1478 - RNA, 19 nt, artificial
  Oligomer
ugggcuuagaucauuccuc

SEQ ID NO: 1479 - RNA, 19 nt, artificial
  Oligomer
uuguuuuuuguuggagugu

SEQ ID NO: 1480 - RNA, 19 nt, artificial
  Oligomer
uaccaccucgaacuuugac

SEQ ID NO: 1481 - RNA, 19 nt, artificial
  Oligomer
cuucacuuuccuggguaag

SEQ ID NO: 1482 - RNA, 19 nt, artificial
  Oligomer
acuacucggaagacuugcc

SEQ ID NO: 1483 - RNA, 19 nt, artificial
  Oligomer
cggauacaaacugguauuc

SEQ ID NO: 1484 - RNA, 19 nt, artificial
  Oligomer
uuuucuucuucucugggcg

SEQ ID NO: 1485 - RNA, 19 nt, artificial
  Oligomer
agaggaauaccuguaccgc

SEQ ID NO: 1486 - RNA, 19 nt, artificial
  Oligomer
cugagaaccaaucucaccg

SEQ ID NO: 1487 - RNA, 19 nt, artificial
  Oligomer
auguacccuauguaccgcu

SEQ ID NO: 1488 - RNA, 19 nt, artificial
  Oligomer
uucaucuuccaaggccaau

SEQ ID NO: 1489 - RNA, 19 nt, artificial
  Oligomer
guuugccggauacaaacug

SEQ ID NO: 1490 - RNA, 19 nt, artificial
  Oligomer
uacaguuuguuccucgugg

SEQ ID NO: 1491 - RNA, 19 nt, artificial
  Oligomer
uccuggguaaggaguacuc

SEQ ID NO: 1492 - RNA, 19 nt, artificial
  Oligomer
auuggauccaaaacuacuc

SEQ ID NO: 1493 - RNA, 19 nt, artificial
  Oligomer
uuccuuaucgccgacaagu

SEQ ID NO: 1494 - RNA, 19 nt, artificial
  Oligomer
caucuuccaaggccaaucc

SEQ ID NO: 1495 - RNA, 19 nt, artificial
  Oligomer
aacuacucggaagacuugc

SEQ ID NO: 1496 - RNA, 19 nt, artificial
  Oligomer
guacccuauguaccgcuuc

SEQ ID NO: 1497 - RNA, 19 nt, artificial
  Oligomer
uucuccagaagcaacuguc

SEQ ID NO: 1498 - RNA, 19 nt, artificial
  Oligomer
ucuguucuggaggaaaggg

SEQ ID NO: 1499 - RNA, 19 nt, artificial
  Oligomer
auacaguuuguuccucgug

SEQ ID NO: 1500 - RNA, 19 nt, artificial
  Oligomer
ugauugacgacgccuuugc

SEQ ID NO: 1501 - RNA, 19 nt, artificial
  Oligomer
uuuuuuguuggaguguuuc

SEQ ID NO: 1502 - RNA, 19 nt, artificial
  Oligomer
agugaguugaaccaggugg

SEQ ID NO: 1503 - RNA, 19 nt, artificial
  Oligomer
aucuuccaaggccaauccu

SEQ ID NO: 1504 - RNA, 19 nt, artificial
  Oligomer
ucaucuuccaaggccaauc

SEQ ID NO: 1505 - RNA, 19 nt, artificial
  Oligomer
uccaacucgguuuggaaac

SEQ ID NO: 1506 - RNA, 19 nt, artificial
  Oligomer
uuugccggauacaaacugg

SEQ ID NO: 1507 - RNA, 19 nt, artificial
  Oligomer
uggcagugccauguaaauc

SEQ ID NO: 1508 - RNA, 19 nt, artificial
  Oligomer
uauuucugccaggaccgcu

SEQ ID NO: 1509 - RNA, 19 nt, artificial
  Oligomer
uaccgcuaugguuacacuc

SEQ ID NO: 1510 - RNA, 19 nt, artificial
  Oligomer
cucauguacccuauguacc

SEQ ID NO: 1511 - RNA, 19 nt, artificial
  Oligomer
uaugguuacacucgggugg

SEQ ID NO: 1512 - RNA, 19 nt, artificial
  Oligomer
ugcaacgugaacaucuucg

SEQ ID NO: 1513 - RNA, 19 nt, artificial
  Oligomer
accgcuaugguuacacucg

SEQ ID NO: 1514 - RNA, 19 nt, artificial
  Oligomer
gcucuccaagaagcuuuuc

SEQ ID NO: 1515 - RNA, 19 nt, artificial
  Oligomer
uuguucaaggaugggaagu

SEQ ID NO: 1516 - RNA, 19 nt, artificial
  Oligomer
aacaucaccuauuggaucc

SEQ ID NO: 1517 - RNA, 19 nt, artificial
  Oligomer
uucuacggccacuacugug

SEQ ID NO: 1518 - RNA, 19 nt, artificial
  Oligomer
aggauacaguuuguuccuc

SEQ ID NO: 1519 - RNA, 19 nt, artificial
  Oligomer
acgaugacgaguugugguc

SEQ ID NO: 1520 - RNA, 19 nt, artificial
  Oligomer
ugccugcaacgugaacauc

SEQ ID NO: 1521 - RNA, 19 nt, artificial
  Oligomer
uuuggaaacgcagauggcg

SEQ ID NO: 1522 - RNA, 19 nt, artificial
  Oligomer
uggauccaaaacuacucgg

SEQ ID NO: 1523 - RNA, 19 nt, artificial
  Oligomer
uugaaccagguggaccaag

SEQ ID NO: 1524 - RNA, 19 nt, artificial
  Oligomer
aucgucauccaguuuggug

SEQ ID NO: 1525 - RNA, 19 nt, artificial
  Oligomer
uccauucaucuuccaaggc

SEQ ID NO: 1526 - RNA, 19 nt, artificial
  Oligomer
uagaucauuccucagugcc

SEQ ID NO: 1527 - RNA, 19 nt, artificial
  Oligomer
uccaaggccaauccuacuc

SEQ ID NO: 1528 - RNA, 19 nt, artificial
  Oligomer
auuccaaaccuuugagggc

SEQ ID NO: 1529 - RNA, 19 nt, artificial
  Oligomer
accucgaacuuugacagcg

SEQ ID NO: 1530 - RNA, 19 nt, artificial
  Oligomer
uucgacgaugacgaguugu

SEQ ID NO: 1531 - RNA, 19 nt, artificial
  Oligomer
aagaugcugcuguucagcg

SEQ ID NO: 1532 - RNA, 19 nt, artificial
  Oligomer
uuucuucuucucugggcgc

SEQ ID NO: 1533 - RNA, 19 nt, artificial
  Oligomer
uguaccgcuaugguuacac

SEQ ID NO: 1534 - RNA, 19 nt, artificial
  Oligomer
aacgugaacaucuucgacg

SEQ ID NO: 1535 - RNA, 19 nt, artificial
  Oligomer
gcaaugcugaugggaaacc

SEQ ID NO: 1536 - RNA, 19 nt, artificial
  Oligomer
uuccuggguaaggaguacu

SEQ ID NO: 1537 - RNA, 19 nt, artificial
  Oligomer
acccugccaguuuccauuc

SEQ ID NO: 1538 - RNA, 19 nt, artificial
  Oligomer
ugguuccaacucgguuugg

SEQ ID NO: 1539 - RNA, 19 nt, artificial
  Oligomer
ucauccaguuuggugucgc

SEQ ID NO: 1540 - RNA, 19 nt, artificial
  Oligomer
uuggauccaaaacuacucg

SEQ ID NO: 1541 - RNA, 19 nt, artificial
  Oligomer
uucacuuuccuggguaagg

SEQ ID NO: 1542 - RNA, 19 nt, artificial
  Oligomer
gucauccaguuuggugucg

SEQ ID NO: 1543 - RNA, 19 nt, artificial
  Oligomer
aauaccuguaccgcuaugg

SEQ ID NO: 1544 - RNA, 19 nt, artificial
  Oligomer
uaugacauccugcagugcc

SEQ ID NO: 1545 - RNA, 19 nt, artificial
  Oligomer
uacgugaccuaugacaucc

SEQ ID NO: 1546 - RNA, 19 nt, artificial
  Oligomer
uuccaaaccuuugagggcg

SEQ ID NO: 1547 - RNA, 19 nt, artificial
  Oligomer
aacaucuucgacgccaucg

SEQ ID NO: 1548 - RNA, 19 nt, artificial
  Oligomer
uuuguauccggcaaacugg

SEQ ID NO: 1549 - RNA, 19 nt, artificial
  Oligomer
ugaggaaugaucuaagccc

SEQ ID NO: 1550 - RNA, 19 nt, artificial
  Oligomer
uucacgucgaaccuccaga

SEQ ID NO: 1551 - RNA, 19 nt, artificial
  Oligomer
uuacauggcacugccaaag

SEQ ID NO: 1552 - RNA, 19 nt, artificial
  Oligomer
uaguuuuggauccaauagg

SEQ ID NO: 1553 - RNA, 19 nt, artificial
  Oligomer
uacauaggguacaugagcg

SEQ ID NO: 1554 - RNA, 19 nt, artificial
  Oligomer
uggccuuggaagaugaaug

SEQ ID NO: 1555 - RNA, 19 nt, artificial
  Oligomer
uuucgacucuccacgcauc

SEQ ID NO: 1556 - RNA, 19 nt, artificial
  Oligomer
uuuuggauccaauagguga

SEQ ID NO: 1557 - RNA, 19 nt, artificial
  Oligomer
uucgacucuccacgcaucu

SEQ ID NO: 1558 - RNA, 19 nt, artificial
  Oligomer
ucgaguacuccuuacccag

SEQ ID NO: 1559 - RNA, 19 nt, artificial
  Oligomer
uuacccaggaaagugaagg

SEQ ID NO: 1560 - RNA, 19 nt, artificial
  Oligomer
ucgcugucaaaguucgagg

SEQ ID NO: 1561 - RNA, 19 nt, artificial
  Oligomer
ucaaaguucgaggugguag

SEQ ID NO: 1562 - RNA, 19 nt, artificial
  Oligomer
uuucucucgguacuggaag

SEQ ID NO: 1563 - RNA, 19 nt, artificial
  Oligomer
aucgccaguacuucccauc

SEQ ID NO: 1564 - RNA, 19 nt, artificial
  Oligomer
uugucgcugucaaaguucg

SEQ ID NO: 1565 - RNA, 19 nt, artificial
  Oligomer
auaggugauguuguggugg

SEQ ID NO: 1566 - RNA, 19 nt, artificial
  Oligomer
ucaaagaccgaguccagcu

SEQ ID NO: 1567 - RNA, 19 nt, artificial
  Oligomer
uucccaucagcauugccgu

SEQ ID NO: 1568 - RNA, 19 nt, artificial
  Oligomer
uuggaaucugcccaggucu

SEQ ID NO: 1569 - RNA, 19 nt, artificial
  Oligomer
accugguucaacucacucc

SEQ ID NO: 1570 - RNA, 19 nt, artificial
  Oligomer
ucugcguuuccaaaccgag

SEQ ID NO: 1571 - RNA, 19 nt, artificial
  Oligomer
uugugguggugccacuuga

SEQ ID NO: 1572 - RNA, 19 nt, artificial
  Oligomer
augccauucacgucguccu

SEQ ID NO: 1573 - RNA, 19 nt, artificial
  Oligomer
uccuugaacaaauacagcu

SEQ ID NO: 1574 - RNA, 19 nt, artificial
  Oligomer
ucgaagauguucacguugc

SEQ ID NO: 1575 - RNA, 19 nt, artificial
  Oligomer
uuccaaaccgaguuggaac

SEQ ID NO: 1576 - RNA, 19 nt, artificial
  Oligomer
uuccgaguaguuuuggauc

SEQ ID NO: 1577 - RNA, 19 nt, artificial
  Oligomer
ucaaagguuuggaaucugc

SEQ ID NO: 1578 - RNA, 19 nt, artificial
  Oligomer
uccuccagaacagaauacc

SEQ ID NO: 1579 - RNA, 19 nt, artificial
  Oligomer
auaccaguuuguauccggc

SEQ ID NO: 1580 - RNA, 19 nt, artificial
  Oligomer
auaggcuuucucucgguac

SEQ ID NO: 1581 - RNA, 19 nt, artificial
  Oligomer
uucccauccuugaacaaau

SEQ ID NO: 1582 - RNA, 19 nt, artificial
  Oligomer
uuguauccggcaaacuggc

SEQ ID NO: 1583 - RNA, 19 nt, artificial
  Oligomer
uugucggcgauaaggaagg

SEQ ID NO: 1584 - RNA, 19 nt, artificial
  Oligomer
uucacgucguccuuaugca

SEQ ID NO: 1585 - RNA, 19 nt, artificial
  Oligomer
augucauaggucacguagc

SEQ ID NO: 1586 - RNA, 19 nt, artificial
  Oligomer
auggcgucgaagauguuca

SEQ ID NO: 1587 - RNA, 19 nt, artificial
  Oligomer
uucaacucacuccgggaac

SEQ ID NO: 1588 - RNA, 19 nt, artificial
  Oligomer
ucucgguacuggaagacgu

SEQ ID NO: 1589 - RNA, 19 nt, artificial
  Oligomer
aauaccaguuuguauccgg

SEQ ID NO: 1590 - RNA, 19 nt, artificial
  Oligomer
aaacacuccaacaaaaaac

SEQ ID NO: 1591 - RNA, 19 nt, artificial
  Oligomer
cuucuugucgcugucaaag

SEQ ID NO: 1592 - RNA, 19 nt, artificial
  Oligomer
uacagcugguucccaaucu

SEQ ID NO: 1593 - RNA, 19 nt, artificial
  Oligomer
uccagaacagaauaccagu

SEQ ID NO: 1594 - RNA, 19 nt, artificial
  Oligomer
uaccaguuuguauccggca

SEQ ID NO: 1595 - RNA, 19 nt, artificial
  Oligomer
ucagagaaucgccaguacu

SEQ ID NO: 1596 - RNA, 19 nt, artificial
  Oligomer
acgaggaacaaacuguauc

SEQ ID NO: 1597 - RNA, 19 nt, artificial
  Oligomer
aagguuuggaaucugccca

SEQ ID NO: 1598 - RNA, 19 nt, artificial
  Oligomer
uuccuccagaacagaauac

SEQ ID NO: 1599 - RNA, 19 nt, artificial
  Oligomer
auuucgacucuccacgcau

SEQ ID NO: 1600 - RNA, 19 nt, artificial
  Oligomer
auugguucucaggucucca

SEQ ID NO: 1601 - RNA, 19 nt, artificial
  Oligomer
auacagcugguucccaauc

SEQ ID NO: 1602 - RNA, 19 nt, artificial
  Oligomer
uagcgguacagguauuccu

SEQ ID NO: 1603 - RNA, 19 nt, artificial
  Oligomer
aaaccgaguuggaaccacg

SEQ ID NO: 1604 - RNA, 19 nt, artificial
  Oligomer
uugcuucuggagaagcagc

SEQ ID NO: 1605 - RNA, 19 nt, artificial
  Oligomer
cagaauaccaguuuguauc

SEQ ID NO: 1606 - RNA, 19 nt, artificial
  Oligomer
uuuacauggcacugccaaa

SEQ ID NO: 1607 - RNA, 19 nt, artificial
  Oligomer
ugcaggaugucauagguca

SEQ ID NO: 1608 - RNA, 19 nt, artificial
  Oligomer
uaggcuuucucucgguacu

SEQ ID NO: 1609 - RNA, 19 nt, artificial
  Oligomer
auccuugaacaaauacagc

SEQ ID NO: 1610 - RNA, 19 nt, artificial
  Oligomer
uaaccauagcgguacaggu

SEQ ID NO: 1611 - RNA, 19 nt, artificial
  Oligomer
uuggaagaugaauggaaac

SEQ ID NO: 1612 - RNA, 19 nt, artificial
  Oligomer
ugcguuuccaaaccgaguu

SEQ ID NO: 1613 - RNA, 19 nt, artificial
  Oligomer
uuagaaacacuccaacaaa

SEQ ID NO: 1614 - RNA, 19 nt, artificial
  Oligomer
acuccaacaaaaaacaaag

SEQ ID NO: 1615 - RNA, 19 nt, artificial
  Oligomer
ucccuuuccuccagaacag

SEQ ID NO: 1616 - RNA, 19 nt, artificial
  Oligomer
uuuccuccagaacagaaua

SEQ ID NO: 1617 - RNA, 19 nt, artificial
  Oligomer
uuggccuuggaagaugaau

SEQ ID NO: 1618 - RNA, 19 nt, artificial
  Oligomer
uaggucacguagcccacuu

SEQ ID NO: 1619 - RNA, 19 nt, artificial
  Oligomer
uccucaaagaccgagucca

SEQ ID NO: 1620 - RNA, 19 nt, artificial
  Oligomer
agugaagcgguacauaggg

SEQ ID NO: 1621 - RNA, 19 nt, artificial
  Oligomer
acagguauuccucugccag

SEQ ID NO: 1622 - RNA, 19 nt, artificial
  Oligomer
aagaagaaaagcuucuugg

SEQ ID NO: 1623 - RNA, 19 nt, artificial
  Oligomer
auaggguacaugagcgccu

SEQ ID NO: 1624 - RNA, 19 nt, artificial
  Oligomer
uacuccuuacccaggaaag

SEQ ID NO: 1625 - RNA, 19 nt, artificial
  Oligomer
uguugugguggugccacuu

SEQ ID NO: 1626 - RNA, 19 nt, artificial
  Oligomer
auuagaaacacuccaacaa

SEQ ID NO: 1627 - RNA, 19 nt, artificial
  Oligomer
uccaccugguucaacucac

SEQ ID NO: 1628 - RNA, 19 nt, artificial
  Oligomer
aaaagcuucuuggagagcc

SEQ ID NO: 1629 - RNA, 19 nt, artificial
  Oligomer
cugaggaaugaucuaagcc

SEQ ID NO: 1630 - RNA, 19 nt, artificial
  Oligomer
uucuugucgcugucaaagu

SEQ ID NO: 1631 - RNA, 19 nt, artificial
  Oligomer
cucccuuuccuccagaaca

SEQ ID NO: 1632 - RNA, 19 nt, artificial
  Oligomer
ugguccaccugguucaacu

SEQ ID NO: 1633 - RNA, 19 nt, artificial
  Oligomer
uccaaaccgaguuggaacc

SEQ ID NO: 1634 - RNA, 19 nt, artificial
  Oligomer
uuuggauccaauaggugau

SEQ ID NO: 1635 - RNA, 19 nt, artificial
  Oligomer
gagauuucgacucuccacg

SEQ ID NO: 1636 - RNA, 19 nt, artificial
  Oligomer
uacauggcacugccaaagc

SEQ ID NO: 1637 - RNA, 19 nt, artificial
  Oligomer
agaaauaggcuuucucucg

SEQ ID NO: 1638 - RNA, 19 nt, artificial
  Oligomer
uugaacaaauacagcuggu

SEQ ID NO: 1639 - RNA, 19 nt, artificial
  Oligomer
gaaugaucuaagcccagcg

SEQ ID NO: 1640 - RNA, 19 nt, artificial
  Oligomer
aaacuguauccuugguccg

SEQ ID NO: 1641 - RNA, 19 nt, artificial
  Oligomer
aagucuuccgaguaguuuu

SEQ ID NO: 1642 - RNA, 19 nt, artificial
  Oligomer
guuuguauccggcaaacug

SEQ ID NO: 1643 - RNA, 19 nt, artificial
  Oligomer
uugguccaccugguucaac

SEQ ID NO: 1644 - RNA, 19 nt, artificial
  Oligomer
ucaaaggcacaguaguggc

SEQ ID NO: 1645 - RNA, 19 nt, artificial
  Oligomer
aagaugaauggaaacuggc

SEQ ID NO: 1646 - RNA, 19 nt, artificial
  Oligomer
accacaacucgucaucguc

SEQ ID NO: 1647 - RNA, 19 nt, artificial
  Oligomer
uccgaguaguuuuggaucc

SEQ ID NO: 1648 - RNA, 19 nt, artificial
  Oligomer
aagagcacaaggguggacu

SEQ ID NO: 1649 - RNA, 19 nt, artificial
  Oligomer
ugucauaggucacguagcc

SEQ ID NO: 1650 - RNA, 19 nt, artificial
  Oligomer
ugaagcgguacauagggua

SEQ ID NO: 1651 - RNA, 19 nt, artificial
  Oligomer
augaauggaaacuggcagg

SEQ ID NO: 1652 - RNA, 19 nt, artificial
  Oligomer
uccaacaaaaaacaaaggu

SEQ ID NO: 1653 - RNA, 19 nt, artificial
  Oligomer
cuccagaacagaauaccag

SEQ ID NO: 1654 - RNA, 19 nt, artificial
  Oligomer
agauuucgacucuccacgc

SEQ ID NO: 1655 - RNA, 19 nt, artificial
  Oligomer
uucacguugcaggcaucgu

SEQ ID NO: 1656 - RNA, 19 nt, artificial
  Oligomer
aacaaaggugagaagagag

SEQ ID NO: 1657 - RNA, 19 nt, artificial
  Oligomer
cuugaacaaauacagcugg

SEQ ID NO: 1658 - RNA, 19 nt, artificial
  Oligomer
aucugcguuuccaaaccga

SEQ ID NO: 1659 - RNA, 19 nt, artificial
  Oligomer
aaagcuucuuggagagccg

SEQ ID NO: 1660 - RNA, 19 nt, artificial
  Oligomer
gagaaucgccaguacuucc

SEQ ID NO: 1661 - RNA, 19 nt, artificial
  Oligomer
guaggauuggccuuggaag

SEQ ID NO: 1662 - RNA, 19 nt, artificial
  Oligomer
cugcguuuccaaaccgagu

SEQ ID NO: 1663 - RNA, 19 nt, artificial
  Oligomer
cucgucaucgucgaaaugg

SEQ ID NO: 1664 - RNA, 19 nt, artificial
  Oligomer
ucgucaucgucgaaauggg

SEQ ID NO: 1665 - RNA, 19 nt, artificial
  Oligomer
uggaugacgaugucugcgu

SEQ ID NO: 1666 - RNA, 19 nt, artificial
  Oligomer
uuggauccaauaggugaug

SEQ ID NO: 1667 - RNA, 19 nt, artificial
  Oligomer
acuggaugacgaugucugc

SEQ ID NO: 1668 - RNA, 19 nt, artificial
  Oligomer
auccaauaggugauguugu

SEQ ID NO: 1669 - RNA, 19 nt, artificial
  Oligomer
uaggugauguugugguggu

SEQ ID NO: 1670 - RNA, 19 nt, artificial
  Oligomer
auaggucacguagcccacu

SEQ ID NO: 1671 - RNA, 19 nt, artificial
  Oligomer
caccugguucaacucacuc

SEQ ID NO: 1672 - RNA, 19 nt, artificial
  Oligomer
cauccuugaacaaauacag

SEQ ID NO: 1673 - RNA, 19 nt, artificial
  Oligomer
acagcugguucccaaucuc

SEQ ID NO: 1674 - RNA, 19 nt, artificial
  Oligomer
acaguaguggccguagaag

SEQ ID NO: 1675 - RNA, 19 nt, artificial
  Oligomer
auggaaacuggcaggguuu

SEQ ID NO: 1676 - RNA, 19 nt, artificial
  Oligomer
cugucggugagauugguuc

SEQ ID NO: 1677 - RNA, 19 nt, artificial
  Oligomer
agucuuccgaguaguuuug

SEQ ID NO: 1678 - RNA, 19 nt, artificial
  Oligomer
auuuacauggcacugccaa

SEQ ID NO: 1679 - RNA, 19 nt, artificial
  Oligomer
caggaugucauaggucacg

SEQ ID NO: 1680 - RNA, 19 nt, artificial
  Oligomer
uguucacguugcaggcauc

SEQ ID NO: 1681 - RNA, 19 nt, artificial
  Oligomer
agcgguacagguauuccuc

SEQ ID NO: 1682 - RNA, 19 nt, artificial
  Oligomer
aacuguauccuugguccgg

SEQ ID NO: 1683 - RNA, 19 nt, artificial
  Oligomer
cugucaaaguucgaggugg

SEQ ID NO: 1684 - RNA, 19 nt, artificial
  Oligomer
ugguacaggucgaguacuc

SEQ ID NO: 1685 - RNA, 19 nt, artificial
  Oligomer
ugagauugguucucagguc

SEQ ID NO: 1686 - RNA, 19 nt, artificial
  Oligomer
ucgcccucaaagguuugga

SEQ ID NO: 1687 - RNA, 19 nt, artificial
  Oligomer
caaagguuuggaaucugcc

SEQ ID NO: 1688 - RNA, 19 nt, artificial
  Oligomer
aggcuuucucucgguacug

SEQ ID NO: 1689 - RNA, 19 nt, artificial
  Oligomer
ugccauucacgucguccuu

SEQ ID NO: 1690 - RNA, 19 nt, artificial
  Oligomer
cacgucguccuuaugcaag

SEQ ID NO: 1691 - RNA, 19 nt, artificial
  Oligomer
uacacgcgagugaagguga

SEQ ID NO: 1692 - RNA, 19 nt, artificial
  Oligomer
aguuuauuagaaacacucc

SEQ ID NO: 1693 - RNA, 19 nt, artificial
  Oligomer
uguauccggcaaacuggcu

SEQ ID NO: 1694 - RNA, 19 nt, artificial
  Oligomer
cacugcaggaugucauagg

SEQ ID NO: 1695 - RNA, 19 nt, artificial
  Oligomer
ccaguacuucccauccuug

SEQ ID NO: 1696 - RNA, 19 nt, artificial
  Oligomer
aguaguuuuggauccaaua

SEQ ID NO: 1697 - RNA, 19 nt, artificial
  Oligomer
uagaaacacuccaacaaaa

SEQ ID NO: 1698 - RNA, 19 nt, artificial
  Oligomer
agaauaccaguuuguaucc

SEQ ID NO: 1699 - RNA, 19 nt, artificial
  Oligomer
cacugaggaaugaucuaag

SEQ ID NO: 1700 - RNA, 19 nt, artificial
  Oligomer
uaggauuggccuuggaaga

SEQ ID NO: 1701 - RNA, 19 nt, artificial
  Oligomer
ugaauggaaacuggcaggg

SEQ ID NO: 1702 - RNA, 19 nt, artificial
  Oligomer
guaguuuuggauccaauag

SEQ ID NO: 1703 - RNA, 19 nt, artificial
  Oligomer
cugcaggaugucauagguc

SEQ ID NO: 1704 - RNA, 19 nt, artificial
  Oligomer
ccuugaacaaauacagcug

SEQ ID NO: 1705 - RNA, 19 nt, artificial
  Oligomer
cagugaagcgguacauagg

SEQ ID NO: 1706 - RNA, 19 nt, artificial
  Oligomer
ugucaaaguucgagguggu

SEQ ID NO: 1707 - RNA, 19 nt, artificial
  Oligomer
uuuccaaaccgaguuggaa

SEQ ID NO: 1708 - RNA, 19 nt, artificial
  Oligomer
agagauuucgacucuccac

SEQ ID NO: 1709 - RNA, 19 nt, artificial
  Oligomer
uacuucccauccuugaaca

SEQ ID NO: 1710 - RNA, 19 nt, artificial
  Oligomer
ugaacaaauacagcugguu

SEQ ID NO: 1711 - RNA, 19 nt, artificial
  Oligomer
ugucgcugucaaaguucga

SEQ ID NO: 1712 - RNA, 19 nt, artificial
  Oligomer
aaaguucgaggugguagcg

SEQ ID NO: 1713 - RNA, 19 nt, artificial
  Oligomer
aggucgaguacuccuuacc

SEQ ID NO: 1714 - RNA, 19 nt, artificial
  Oligomer
uccuuacccaggaaaguga

SEQ ID NO: 1715 - RNA, 19 nt, artificial
  Oligomer
aaccgaguuggaaccacga

SEQ ID NO: 1716 - RNA, 19 nt, artificial
  Oligomer
ucaucgucgaaaugggcgu

SEQ ID NO: 1717 - RNA, 19 nt, artificial
  Oligomer
aagguuagagaauccaagu

SEQ ID NO: 1718 - RNA, 19 nt, artificial
  Oligomer
aacacuccaacaaaaaaca

SEQ ID NO: 1719 - RNA, 19 nt, artificial
  Oligomer
aaaggugagaagagagggc

SEQ ID NO: 1720 - RNA, 19 nt, artificial
  Oligomer
aggaugucauaggucacgu

SEQ ID NO: 1721 - RNA, 19 nt, artificial
  Oligomer
cuugucggcgauaaggaag

SEQ ID NO: 1722 - RNA, 19 nt, artificial
  Oligomer
ucacgucguccuuaugcaa

SEQ ID NO: 1723 - RNA, 19 nt, artificial
  Oligomer
uucucaggucuccagggaa

SEQ ID NO: 1724 - RNA, 19 nt, artificial
  Oligomer
ugucggugagauugguucu

SEQ ID NO: 1725 - RNA, 19 nt, artificial
  Oligomer
ucggugagauugguucuca

SEQ ID NO: 1726 - RNA, 19 nt, artificial
  Oligomer
auguugugguggugccacu

SEQ ID NO: 1727 - RNA, 19 nt, artificial
  Oligomer
guuuauuagaaacacucca

SEQ ID NO: 1728 - RNA, 19 nt, artificial
  Oligomer
aaaacaaaggugagaagag

SEQ ID NO: 1729 - RNA, 19 nt, artificial
  Oligomer
caaaggugagaagagaggg

SEQ ID NO: 1730 - RNA, 19 nt, artificial
  Oligomer
cagagauuucgacucucca

SEQ ID NO: 1731 - RNA, 19 nt, artificial
  Oligomer
agaacagaauaccaguuug

SEQ ID NO: 1732 - RNA, 19 nt, artificial
  Oligomer
acccgaguguaaccauagc

SEQ ID NO: 1733 - RNA, 19 nt, artificial
  Oligomer
guacauaggguacaugagc

SEQ ID NO: 1734 - RNA, 19 nt, artificial
  Oligomer
uggaagaugaauggaaacu

SEQ ID NO: 1735 - RNA, 19 nt, artificial
  Oligomer
guuucccaucagcauugcc

SEQ ID NO: 1736 - RNA, 19 nt, artificial
  Oligomer
cuuuccuccagaacagaau

SEQ ID NO: 1737 - RNA, 19 nt, artificial
  Oligomer
aauggaaacuggcaggguu

SEQ ID NO: 1738 - RNA, 19 nt, artificial
  Oligomer
uccuggguguagagucucu

SEQ ID NO: 1739 - RNA, 19 nt, artificial
  Oligomer
ccaucugcguuuccaaacc

SEQ ID NO: 1740 - RNA, 19 nt, artificial
  Oligomer
caucugcguuuccaaaccg

SEQ ID NO: 1741 - RNA, 19 nt, artificial
  Oligomer
ucuccagggaagagcacaa

SEQ ID NO: 1742 - RNA, 19 nt, artificial
  Oligomer
guuuuggauccaauaggug

SEQ ID NO: 1743 - RNA, 19 nt, artificial
  Oligomer
gugagauugguucucaggu

SEQ ID NO: 1744 - RNA, 19 nt, artificial
  Oligomer
gggauuuacauggcacugc

SEQ ID NO: 1745 - RNA, 19 nt, artificial
  Oligomer
cagaaauaggcuuucucuc

SEQ ID NO: 1746 - RNA, 19 nt, artificial
  Oligomer
aauaggcuuucucucggua

SEQ ID NO: 1747 - RNA, 19 nt, artificial
  Oligomer
ucucucgguacuggaagac

SEQ ID NO: 1748 - RNA, 19 nt, artificial
  Oligomer
aauacagcugguucccaau

SEQ ID NO: 1749 - RNA, 19 nt, artificial
  Oligomer
agauguucacguugcaggc

SEQ ID NO: 1750 - RNA, 19 nt, artificial
  Oligomer
acucaaaggcacaguagug

SEQ ID NO: 1751 - RNA, 19 nt, artificial
  Oligomer
gucgaguacuccuuaccca

SEQ ID NO: 1752 - RNA, 19 nt, artificial
  Oligomer
ugauguugugguggugcca

SEQ ID NO: 1753 - RNA, 19 nt, artificial
  Oligomer
ucaacucacuccgggaacu

SEQ ID NO: 1754 - RNA, 19 nt, artificial
  Oligomer
ccauccuugaacaaauaca

SEQ ID NO: 1755 - RNA, 19 nt, artificial
  Oligomer
guacaggucgaguacuccu

SEQ ID NO: 1756 - RNA, 19 nt, artificial
  Oligomer
cuccuuacccaggaaagug

SEQ ID NO: 1757 - RNA, 19 nt, artificial
  Oligomer
uggauccaauaggugaugu

SEQ ID NO: 1758 - RNA, 19 nt, artificial
  Oligomer
ugcuucuggagaagcagca

SEQ ID NO: 1759 - RNA, 19 nt, artificial
  Oligomer
cagagaaucgccaguacuu

SEQ ID NO: 1760 - RNA, 19 nt, artificial
  Oligomer
gucgaagauguucacguug

SEQ ID NO: 1761 - RNA, 19 nt, artificial
  Oligomer
acgucguccuuaugcaagg

SEQ ID NO: 1762 - RNA, 19 nt, artificial
  Oligomer
aaacuggcaggguuuccca

SEQ ID NO: 1763 - RNA, 19 nt, artificial
  Oligomer
acugcaggaugucauaggu

SEQ ID NO: 1764 - RNA, 19 nt, artificial
  Oligomer
aacucacuccgggaacuca

SEQ ID NO: 1765 - RNA, 19 nt, artificial
  Oligomer
aagcgguccuggcagaaau

SEQ ID NO: 1766 - RNA, 19 nt, artificial
  Oligomer
gaaauaggcuuucucucgg

SEQ ID NO: 1767 - RNA, 19 nt, artificial
  Oligomer
auguucacguugcaggcau

SEQ ID NO: 1768 - RNA, 19 nt, artificial
  Oligomer
cggcacugaggaaugaucu

SEQ ID NO: 1769 - RNA, 19 nt, artificial
  Oligomer
acaggucgaguacuccuua

SEQ ID NO: 1770 - RNA, 19 nt, artificial
  Oligomer
uguacacgcgagugaaggu

SEQ ID NO: 1771 - RNA, 19 nt, artificial
  Oligomer
aguuuuggauccaauaggu

SEQ ID NO: 1772 - RNA, 19 nt, artificial
  Oligomer
aaauaggcuuucucucggu

SEQ ID NO: 1773 - RNA, 19 nt, artificial
  Oligomer
aagaaaagcuucuuggaga

SEQ ID NO: 1774 - RNA, 19 nt, artificial
  Oligomer
aaucgccaguacuucccau

SEQ ID NO: 1775 - RNA, 19 nt, artificial
  Oligomer
guaaccauagcgguacagg

SEQ ID NO: 1776 - RNA, 19 nt, artificial
  Oligomer
ucuugucgcugucaaaguu

SEQ ID NO: 1777 - RNA, 19 nt, artificial
  Oligomer
aguaggauuggccuuggaa

SEQ ID NO: 1778 - RNA, 19 nt, artificial
  Oligomer
uggaaacuggcaggguuuc

SEQ ID NO: 1779 - RNA, 19 nt, artificial
  Oligomer
accaaacuggaugacgaug

SEQ ID NO: 1780 - RNA, 19 nt, artificial
  Oligomer
cuggcagaaauaggcuuuc

SEQ ID NO: 1781 - RNA, 19 nt, artificial
  Oligomer
ccagagaagaagaaaagcu

SEQ ID NO: 1782 - RNA, 19 nt, artificial
  Oligomer
aguacuucccauccuugaa

SEQ ID NO: 1783 - RNA, 19 nt, artificial
  Oligomer
cuucccauccuugaacaaa

SEQ ID NO: 1784 - RNA, 19 nt, artificial
  Oligomer
uguaaccauagcgguacag

SEQ ID NO: 1785 - RNA, 19 nt, artificial
  Oligomer
uacccaggaaagugaaggg

SEQ ID NO: 1786 - RNA, 19 nt, artificial
  Oligomer
gaugaauggaaacuggcag

SEQ ID NO: 1787 - RNA, 19 nt, artificial
  Oligomer
agguuuggaaucugcccag

SEQ ID NO: 1788 - RNA, 19 nt, artificial
  Oligomer
agauugguucucaggucuc

SEQ ID NO: 1789 - RNA, 19 nt, artificial
  Oligomer
agggacaguugcuucugga

SEQ ID NO: 1790 - RNA, 19 nt, artificial
  Oligomer
uccuggcagaaauaggcuu

SEQ ID NO: 1791 - RNA, 19 nt, artificial
  Oligomer
gcagaaauaggcuuucucu

SEQ ID NO: 1792 - RNA, 19 nt, artificial
  Oligomer
uucucucgguacuggaaga

SEQ ID NO: 1793 - RNA, 19 nt, artificial
  Oligomer
aggguuucccaucagcauu

SEQ ID NO: 1794 - RNA, 19 nt, artificial
  Oligomer
ucuuccgaguaguuuugga

SEQ ID NO: 1795 - RNA, 19 nt, artificial
  Oligomer
ggugagauugguucucagg

SEQ ID NO: 1796 - RNA, 19 nt, artificial
  Oligomer
cuccaacaaaaaacaaagg

SEQ ID NO: 1797 - RNA, 19 nt, artificial
  Oligomer
cagagaagaagaaaagcuu

SEQ ID NO: 1798 - RNA, 19 nt, artificial
  Oligomer
agagaagaagaaaagcuuc

SEQ ID NO: 1799 - RNA, 19 nt, artificial
  Oligomer
ggaagaugaauggaaacug

SEQ ID NO: 1800 - RNA, 19 nt, artificial
  Oligomer
gacaccaaacuggaugacg

SEQ ID NO: 1801 - RNA, 19 nt, artificial
  Oligomer
ccagagauuucgacucucc

SEQ ID NO: 1802 - RNA, 19 nt, artificial
  Oligomer
aaaaacaaaggugagaaga

SEQ ID NO: 1803 - RNA, 19 nt, artificial
  Oligomer
uccucccuuuccuccagaa

SEQ ID NO: 1804 - RNA, 19 nt, artificial
  Oligomer
ucccauccuugaacaaaua

SEQ ID NO: 1805 - RNA, 19 nt, artificial
  Oligomer
gauggcgucgaagauguuc

SEQ ID NO: 1806 - RNA, 19 nt, artificial
  Oligomer
gaagauguucacguugcag

SEQ ID NO: 1807 - RNA, 19 nt, artificial
  Oligomer
agguauuccucugccagcu

SEQ ID NO: 1808 - RNA, 19 nt, artificial
  Oligomer
aacuggcaggguuucccau

SEQ ID NO: 1809 - RNA, 19 nt, artificial
  Oligomer
acucgucaucgucgaaaug

SEQ ID NO: 1810 - RNA, 19 nt, artificial
  Oligomer
aggugauguugugguggug

SEQ ID NO: 1811 - RNA, 19 nt, artificial
  Oligomer
guuagagaauccaaguuua

SEQ ID NO: 1812 - RNA, 19 nt, artificial
  Oligomer
gcuuucucucgguacugga

SEQ ID NO: 1813 - RNA, 19 nt, artificial
  Oligomer
cgaggaacaaacuguaucc

SEQ ID NO: 1814 - RNA, 19 nt, artificial
  Oligomer
acuucuugucgcugucaaa

SEQ ID NO: 1815 - RNA, 19 nt, artificial
  Oligomer
gucgcugucaaaguucgag

SEQ ID NO: 1816 - RNA, 19 nt, artificial
  Oligomer
cucagagaaucgccaguac

SEQ ID NO: 1817 - RNA, 19 nt, artificial
  Oligomer
gaacaaauacagcugguuc

SEQ ID NO: 1818 - RNA, 19 nt, artificial
  Oligomer
cauucacgucguccuuaug

SEQ ID NO: 1819 - RNA, 19 nt, artificial
  Oligomer
guacagguauuccucugcc

SEQ ID NO: 1820 - RNA, 19 nt, artificial
  Oligomer
cuuggaagaugaauggaaa

SEQ ID NO: 1821 - RNA, 19 nt, artificial
  Oligomer
acaccaaacuggaugacga

SEQ ID NO: 1822 - RNA, 19 nt, artificial
  Oligomer
ccaaacuggaugacgaugu

SEQ ID NO: 1823 - RNA, 19 nt, artificial
  Oligomer
ccaauaggugauguugugg

SEQ ID NO: 1824 - RNA, 19 nt, artificial
  Oligomer
acagaauaccaguuuguau

SEQ ID NO: 1825 - RNA, 19 nt, artificial
  Oligomer
guccaccugguucaacuca

SEQ ID NO: 1826 - RNA, 19 nt, artificial
  Oligomer
uggcgucgaagauguucac

SEQ ID NO: 1827 - RNA, 19 nt, artificial
  Oligomer
aucguccaccggacucaaa

SEQ ID NO: 1828 - RNA, 19 nt, artificial
  Oligomer
cucagugaagcgguacaua

SEQ ID NO: 1829 - RNA, 19 nt, artificial
  Oligomer
cgguacauaggguacauga

SEQ ID NO: 1830 - RNA, 19 nt, artificial
  Oligomer
acuccuuacccaggaaagu

SEQ ID NO: 1831 - RNA, 19 nt, artificial
  Oligomer
agaagccgaagagcuuguc

SEQ ID NO: 1832 - RNA, 19 nt, artificial
  Oligomer
ccuccagaacagaauacca

SEQ ID NO: 1833 - RNA, 19 nt, artificial
  Oligomer
gaagaagaaaagcuucuug

SEQ ID NO: 1834 - RNA, 19 nt, artificial
  Oligomer
cacuugucggcgauaagga

SEQ ID NO: 1835 - RNA, 19 nt, artificial
  Oligomer
ccucagagaaucgccagua

SEQ ID NO: 1836 - RNA, 19 nt, artificial
  Oligomer
ggaacaaacuguauccuug

SEQ ID NO: 1837 - RNA, 19 nt, artificial
  Oligomer
gauccaauaggugauguug

SEQ ID NO: 1838 - RNA, 19 nt, artificial
  Oligomer
cucaaagguuuggaaucug

SEQ ID NO: 1839 - RNA, 19 nt, artificial
  Oligomer
guuuggaaucugcccaggu

SEQ ID NO: 1840 - RNA, 19 nt, artificial
  Oligomer
agaaacacuccaacaaaaa

SEQ ID NO: 1841 - RNA, 19 nt, artificial
  Oligomer
uccggcacugaggaaugau

SEQ ID NO: 1842 - RNA, 19 nt, artificial
  Oligomer
aggaaugaucuaagcccag

SEQ ID NO: 1843 - RNA, 19 nt, artificial
  Oligomer
agaugaauggaaacuggca

SEQ ID NO: 1844 - RNA, 19 nt, artificial
  Oligomer
gccaucugcguuuccaaac

SEQ ID NO: 1845 - RNA, 19 nt, artificial
  Oligomer
gucggugagauugguucuc

SEQ ID NO: 1846 - RNA, 19 nt, artificial
  Oligomer
ccaacaaaaaacaaaggug

SEQ ID NO: 1847 - RNA, 19 nt, artificial
  Oligomer
cuuucucucgguacuggaa

SEQ ID NO: 1848 - RNA, 19 nt, artificial
  Oligomer
cccagagaagaagaaaagc

SEQ ID NO: 1849 - RNA, 19 nt, artificial
  Oligomer
agaaaagcuucuuggagag

SEQ ID NO: 1850 - RNA, 19 nt, artificial
  Oligomer
gccaguacuucccauccuu

SEQ ID NO: 1851 - RNA, 19 nt, artificial
  Oligomer
caaauacagcugguuccca

SEQ ID NO: 1852 - RNA, 19 nt, artificial
  Oligomer
aaccauagcgguacaggua

SEQ ID NO: 1853 - RNA, 19 nt, artificial
  Oligomer
accauagcgguacagguau

SEQ ID NO: 1854 - RNA, 19 nt, artificial
  Oligomer
aagcgguacauaggguaca

SEQ ID NO: 1855 - RNA, 19 nt, artificial
  Oligomer
aacaaacuguauccuuggu

SEQ ID NO: 1856 - RNA, 19 nt, artificial
  Oligomer
uggcagaaauaggcuuucu

SEQ ID NO: 1857 - RNA, 19 nt, artificial
  Oligomer
ggcagaaauaggcuuucuc

SEQ ID NO: 1858 - RNA, 19 nt, artificial
  Oligomer
cacccgaguguaaccauag

SEQ ID NO: 1859 - RNA, 19 nt, artificial
  Oligomer
ggccuuggaagaugaaugg

SEQ ID NO: 1860 - RNA, 19 nt, artificial
  Oligomer
cacaacucgucaucgucga

SEQ ID NO: 1861 - RNA, 19 nt, artificial
  Oligomer
aaugggcgucucccugaau

SEQ ID NO: 1862 - RNA, 19 nt, artificial
  Oligomer
cuuccgaguaguuuuggau

SEQ ID NO: 1863 - RNA, 19 nt, artificial
  Oligomer
ccaaguuuauuagaaacac

SEQ ID NO: 1864 - RNA, 19 nt, artificial
  Oligomer
aguuuguauccggcaaacu

SEQ ID NO: 1865 - RNA, 19 nt, artificial
  Oligomer
ggauuuacauggcacugcc

SEQ ID NO: 1866 - RNA, 19 nt, artificial
  Oligomer
gcaggaugucauaggucac

SEQ ID NO: 1867 - RNA, 19 nt, artificial
  Oligomer
cccauccuugaacaaauac

SEQ ID NO: 1868 - RNA, 19 nt, artificial
  Oligomer
gcgucgaagauguucacgu

SEQ ID NO: 1869 - RNA, 19 nt, artificial
  Oligomer
aggaacaaacuguauccuu

SEQ ID NO: 1870 - RNA, 19 nt, artificial
  Oligomer
cacuucuugucgcugucaa

SEQ ID NO: 1871 - RNA, 19 nt, artificial
  Oligomer
ccuuggaagaugaauggaa

SEQ ID NO: 1872 - RNA, 19 nt, artificial
  Oligomer
ggguuucccaucagcauug

SEQ ID NO: 1873 - RNA, 19 nt, artificial
  Oligomer
aaaugggcgucucccugaa

SEQ ID NO: 1874 - RNA, 19 nt, artificial
  Oligomer
acaaaaaacaaaggugaga

SEQ ID NO: 1875 - RNA, 19 nt, artificial
  Oligomer
aacagaauaccaguuugua

SEQ ID NO: 1876 - RNA, 19 nt, artificial
  Oligomer
aacucgucaucgucgaaau

SEQ ID NO: 1877 - RNA, 19 nt, artificial
  Oligomer
gucuuccgaguaguuuugg

SEQ ID NO: 1878 - RNA, 19 nt, artificial
  Oligomer
aggucgcccucaaagguuu

SEQ ID NO: 1879 - RNA, 19 nt, artificial
  Oligomer
ccucaaagguuuggaaucu

SEQ ID NO: 1880 - RNA, 19 nt, artificial
  Oligomer
ccuuuccuccagaacagaa

SEQ ID NO: 1881 - RNA, 19 nt, artificial
  Oligomer
gcacugcaggaugucauag

SEQ ID NO: 1882 - RNA, 19 nt, artificial
  Oligomer
cagaagccgaagagcuugu

SEQ ID NO: 1883 - RNA, 19 nt, artificial
  Oligomer
caggguuucccaucagcau

SEQ ID NO: 1884 - RNA, 19 nt, artificial
  Oligomer
ggacaguugcuucuggaga

SEQ ID NO: 1885 - RNA, 19 nt, artificial
  Oligomer
caguugcuucuggagaagc

SEQ ID NO: 1886 - RNA, 19 nt, artificial
  Oligomer
caacaaaaaacaaagguga

SEQ ID NO: 1887 - RNA, 19 nt, artificial
  Oligomer
gacucaaaggcacaguagu

SEQ ID NO: 1888 - RNA, 19 nt, artificial
  Oligomer
gccauucacgucguccuua

SEQ ID NO: 1889 - RNA, 19 nt, artificial
  Oligomer
ccauucacgucguccuuau

SEQ ID NO: 1890 - RNA, 19 nt, artificial
  Oligomer
caaaggcgucgucaaucac

SEQ ID NO: 1891 - RNA, 19 nt, artificial
  Oligomer
guugcuucuggagaagcag

SEQ ID NO: 1892 - RNA, 19 nt, artificial
  Oligomer
guucaacucacuccgggaa

SEQ ID NO: 1893 - RNA, 19 nt, artificial
  Oligomer
agaagaagaaaagcuucuu

SEQ ID NO: 1894 - RNA, 19 nt, artificial
  Oligomer
gugaagcgguacauagggu

SEQ ID NO: 1895 - RNA, 19 nt, artificial
  Oligomer
ccacuucuugucgcuguca

SEQ ID NO: 1896 - RNA, 19 nt, artificial
  Oligomer
gcugucaaaguucgaggug

SEQ ID NO: 1897 - RNA, 19 nt, artificial
  Oligomer
cgguacagguauuccucug

SEQ ID NO: 1898 - RNA, 19 nt, artificial
  Oligomer
acuugaggucgcccucaaa

SEQ ID NO: 1899 - RNA, 19 nt, artificial
  Oligomer
cccagagauuucgacucuc

SEQ ID NO: 1900 - RNA, 19 nt, artificial
  Oligomer
aaaaaacaaaggugagaag

SEQ ID NO: 1901 - RNA, 19 nt, artificial
  Oligomer
ccagaacagaauaccaguu

SEQ ID NO: 1902 - RNA, 19 nt, artificial
  Oligomer
accaguuuguauccggcaa

SEQ ID NO: 1903 - RNA, 19 nt, artificial
  Oligomer
gauuucgacucuccacgca

SEQ ID NO: 1904 - RNA, 19 nt, artificial
  Oligomer
gaaucgccaguacuuccca

SEQ ID NO: 1905 - RNA, 19 nt, artificial
  Oligomer
gguacagguauuccucugc

SEQ ID NO: 1906 - RNA, 19 nt, artificial
  Oligomer
gcguuuccaaaccgaguug

SEQ ID NO: 1907 - RNA, 19 nt, artificial
  Oligomer
caaaccgaguuggaaccac

SEQ ID NO: 1908 - RNA, 19 nt, artificial
  Oligomer
agggaccacaacucgucau

SEQ ID NO: 1909 - RNA, 19 nt, artificial
  Oligomer
gagauugguucucaggucu

SEQ ID NO: 1910 - RNA, 19 nt, artificial
  Oligomer
gagaagaagaaaagcuucu

SEQ ID NO: 1911 - RNA, 19 nt, artificial
  Oligomer
gaagaaaagcuucuuggag

SEQ ID NO: 1912 - RNA, 19 nt, artificial
  Oligomer
ggaaugaucuaagcccagc

SEQ ID NO: 1913 - RNA, 19 nt, artificial
  Oligomer
gccacgaggaacaaacugu

SEQ ID NO: 1914 - RNA, 19 nt, artificial
  Oligomer
guacuccuuacccaggaaa

SEQ ID NO: 1915 - RNA, 19 nt, artificial
  Oligomer
cguuuccaaaccgaguugg

SEQ ID NO: 1916 - RNA, 19 nt, artificial
  Oligomer
ggacucaaaggcacaguag

SEQ ID NO: 1917 - RNA, 19 nt, artificial
  Oligomer
ccucagugaagcgguacau

SEQ ID NO: 1918 - RNA, 19 nt, artificial
  Oligomer
cugguacaggucgaguacu

SEQ ID NO: 1919 - RNA, 19 nt, artificial
  Oligomer
cccucaaagguuuggaauc

SEQ ID NO: 1920 - RNA, 19 nt, artificial
  Oligomer
aguugcuucuggagaagca

SEQ ID NO: 1921 - RNA, 19 nt, artificial
  Oligomer
guccuggcagaaauaggcu

SEQ ID NO: 1922 - RNA, 19 nt, artificial
  Oligomer
ccuggcagaaauaggcuuu

SEQ ID NO: 1923 - RNA, 19 nt, artificial
  Oligomer
gcugaacagcagcaucuuc

SEQ ID NO: 1924 - RNA, 19 nt, artificial
  Oligomer
gcccagagaagaagaaaag

SEQ ID NO: 1925 - RNA, 19 nt, artificial
  Oligomer
gcacugaggaaugaucuaa

SEQ ID NO: 1926 - RNA, 19 nt, artificial
  Oligomer
gcgguacauaggguacaug

SEQ ID NO: 1927 - RNA, 19 nt, artificial
  Oligomer
caggucgaguacuccuuac

SEQ ID NO: 1928 - RNA, 19 nt, artificial
  Oligomer
ccugucggugagauugguu

SEQ ID NO: 1929 - RNA, 19 nt, artificial
  Oligomer
agguuagagaauccaaguu

SEQ ID NO: 1930 - RNA, 19 nt, artificial
  Oligomer
acauggcacugccaaagca

SEQ ID NO: 1931 - RNA, 19 nt, artificial
  Oligomer
aacucacgcgccaguagaa

SEQ ID NO: 1932 - RNA, 19 nt, artificial
  Oligomer
acaguugcuucuggagaag

SEQ ID NO: 1933 - RNA, 19 nt, artificial
  Oligomer
caaaaaacaaaggugagaa

SEQ ID NO: 1934 - RNA, 19 nt, artificial
  Oligomer
agaagaaaagcuucuugga

SEQ ID NO: 1935 - RNA, 19 nt, artificial
  Oligomer
cggacucaaaggcacagua

SEQ ID NO: 1936 - RNA, 19 nt, artificial
  Oligomer
gaggaaugaucuaagccca

SEQ ID NO: 1937 - RNA, 19 nt, artificial
  Oligomer
acacuccaacaaaaaacaa

SEQ ID NO: 1938 - RNA, 19 nt, artificial
  Oligomer
gucaaaguucgagguggua

SEQ ID NO: 1939 - RNA, 19 nt, artificial
  Oligomer
cuuacccaggaaagugaag

SEQ ID NO: 1940 - RNA, 19 nt, artificial
  Oligomer
ggcaagucuuccgaguagu

SEQ ID NO: 1941 - RNA, 19 nt, artificial
  Oligomer
gaauaccaguuuguauccg

SEQ ID NO: 1942 - RNA, 19 nt, artificial
  Oligomer
cgcccagagaagaagaaaa

SEQ ID NO: 1943 - RNA, 19 nt, artificial
  Oligomer
gcgguacagguauuccucu

SEQ ID NO: 1944 - RNA, 19 nt, artificial
  Oligomer
cggugagauugguucucag

SEQ ID NO: 1945 - RNA, 19 nt, artificial
  Oligomer
agcgguacauaggguacau

SEQ ID NO: 1946 - RNA, 19 nt, artificial
  Oligomer
auuggccuuggaagaugaa

SEQ ID NO: 1947 - RNA, 19 nt, artificial
  Oligomer
caguuuguauccggcaaac

SEQ ID NO: 1948 - RNA, 19 nt, artificial
  Oligomer
ccacgaggaacaaacugua

SEQ ID NO: 1949 - RNA, 19 nt, artificial
  Oligomer
gaguacuccuuacccagga

SEQ ID NO: 1950 - RNA, 19 nt, artificial
  Oligomer
gaguaguuuuggauccaau

SEQ ID NO: 1951 - RNA, 19 nt, artificial
  Oligomer
acuugucggcgauaaggaa

SEQ ID NO: 1952 - RNA, 19 nt, artificial
  Oligomer
ggauuggccuuggaagaug

SEQ ID NO: 1953 - RNA, 19 nt, artificial
  Oligomer
gcaagucuuccgaguaguu

SEQ ID NO: 1954 - RNA, 19 nt, artificial
  Oligomer
gaagcgguacauaggguac

SEQ ID NO: 1955 - RNA, 19 nt, artificial
  Oligomer
gacaguugcuucuggagaa

SEQ ID NO: 1956 - RNA, 19 nt, artificial
  Oligomer
cccuuuccuccagaacaga

SEQ ID NO: 1957 - RNA, 19 nt, artificial
  Oligomer
cacgaggaacaaacuguau

SEQ ID NO: 1958 - RNA, 19 nt, artificial
  Oligomer
gcaaaggcgucgucaauca

SEQ ID NO: 1959 - RNA, 19 nt, artificial
  Oligomer
gaaacacuccaacaaaaaa

SEQ ID NO: 1960 - RNA, 19 nt, artificial
  Oligomer
ccaccugguucaacucacu

SEQ ID NO: 1961 - RNA, 19 nt, artificial
  Oligomer
aggauuggccuuggaagau

SEQ ID NO: 1962 - RNA, 19 nt, artificial
  Oligomer
gauuggccuuggaagauga

SEQ ID NO: 1963 - RNA, 19 nt, artificial
  Oligomer
guuuccaaaccgaguugga

SEQ ID NO: 1964 - RNA, 19 nt, artificial
  Oligomer
ccaguuuguauccggcaaa

SEQ ID NO: 1965 - RNA, 19 nt, artificial
  Oligomer
gauuuacauggcacugcca

SEQ ID NO: 1966 - RNA, 19 nt, artificial
  Oligomer
agcgguccuggcagaaaua

SEQ ID NO: 1967 - RNA, 19 nt, artificial
  Oligomer
gaguguaaccauagcggua

SEQ ID NO: 1968 - RNA, 19 nt, artificial
  Oligomer
gguacauaggguacaugag

SEQ ID NO: 1969 - RNA, 19 nt, artificial
  Oligomer
ccacccgaguguaaccaua

SEQ ID NO: 1970 - RNA, 19 nt, artificial
  Oligomer
cgaagauguucacguugca

SEQ ID NO: 1971 - RNA, 19 nt, artificial
  Oligomer
cgaguguaaccauagcggu

SEQ ID NO: 1972 - RNA, 19 nt, artificial
  Oligomer
gaaaagcuucuuggagagc

SEQ ID NO: 1973 - RNA, 19 nt, artificial
  Oligomer
acuucccauccuugaacaa

SEQ ID NO: 1974 - RNA, 19 nt, artificial
  Oligomer
ggauccaauaggugauguu

SEQ ID NO: 1975 - RNA, 19 nt, artificial
  Oligomer
cacaguaguggccguagaa

SEQ ID NO: 1976 - RNA, 19 nt, artificial
  Oligomer
gaggaacaaacuguauccu

SEQ ID NO: 1977 - RNA, 19 nt, artificial
  Oligomer
gaccacaacucgucaucgu

SEQ ID NO: 1978 - RNA, 19 nt, artificial
  Oligomer
gauguucacguugcaggca

SEQ ID NO: 1979 - RNA, 19 nt, artificial
  Oligomer
cgccaucugcguuuccaaa

SEQ ID NO: 1980 - RNA, 19 nt, artificial
  Oligomer
ccgaguaguuuuggaucca

SEQ ID NO: 1981 - RNA, 19 nt, artificial
  Oligomer
cuugguccaccugguucaa

SEQ ID NO: 1982 - RNA, 19 nt, artificial
  Oligomer
caccaaacuggaugacgau

SEQ ID NO: 1983 - RNA, 19 nt, artificial
  Oligomer
gccuuggaagaugaaugga

SEQ ID NO: 1984 - RNA, 19 nt, artificial
  Oligomer
ggcacugaggaaugaucua

SEQ ID NO: 1985 - RNA, 19 nt, artificial
  Oligomer
gaguaggauuggccuugga

SEQ ID NO: 1986 - RNA, 19 nt, artificial
  Oligomer
gcccucaaagguuuggaau

SEQ ID NO: 1987 - RNA, 19 nt, artificial
  Oligomer
cgcugucaaaguucgaggu

SEQ ID NO: 1988 - RNA, 19 nt, artificial
  Oligomer
acaacucgucaucgucgaa

SEQ ID NO: 1989 - RNA, 19 nt, artificial
  Oligomer
cgcugaacagcagcaucuu

SEQ ID NO: 1990 - RNA, 19 nt, artificial
  Oligomer
gcgcccagagaagaagaaa

SEQ ID NO: 1991 - RNA, 19 nt, artificial
  Oligomer
guguaaccauagcgguaca

SEQ ID NO: 1992 - RNA, 19 nt, artificial
  Oligomer
cgucgaagauguucacguu

SEQ ID NO: 1993 - RNA, 19 nt, artificial
  Oligomer
gguuucccaucagcauugc

SEQ ID NO: 1994 - RNA, 19 nt, artificial
  Oligomer
aguacuccuuacccaggaa

SEQ ID NO: 1995 - RNA, 19 nt, artificial
  Oligomer
gaauggaaacuggcagggu

SEQ ID NO: 1996 - RNA, 19 nt, artificial
  Oligomer
ccaaaccgaguuggaacca

SEQ ID NO: 1997 - RNA, 19 nt, artificial
  Oligomer
gcgacaccaaacuggauga

SEQ ID NO: 1998 - RNA, 19 nt, artificial
  Oligomer
cgaguaguuuuggauccaa

SEQ ID NO: 1999 - RNA, 19 nt, artificial
  Oligomer
ccuuacccaggaaagugaa

SEQ ID NO: 2000 - RNA, 19 nt, artificial
  Oligomer
cgacaccaaacuggaugac

SEQ ID NO: 2001 - RNA, 19 nt, artificial
  Oligomer
ccauagcgguacagguauu

SEQ ID NO: 2002 - RNA, 19 nt, artificial
  Oligomer
ggcacugcaggaugucaua

SEQ ID NO: 2003 - RNA, 19 nt, artificial
  Oligomer
ggaugucauaggucacgua

SEQ ID NO: 2004 - RNA, 19 nt, artificial
  Oligomer
cgcccucaaagguuuggaa

SEQ ID NO: 2005 - RNA, 19 nt, artificial
  Oligomer
cgauggcgucgaagauguu

SEQ ID NO: 2006 - RNA, 19 nt, artificial
  Oligomer
ggguggaagcgguaacaaa

SEQ ID NO: 2007 - RNA, 19 nt, artificial
  Oligomer
ccuuggagacaaaaucuua

SEQ ID NO: 2008 - RNA, 19 nt, artificial
  Oligomer
ccucauuccugcuuuaaaa

SEQ ID NO: 2009 - RNA, 19 nt, artificial
  Oligomer
cuuggagacaaaaucuuaa

SEQ ID NO: 2010 - RNA, 19 nt, artificial
  Oligomer
caaauuccaccaguaugca

SEQ ID NO: 2011 - RNA, 19 nt, artificial
  Oligomer
gccucuguauuuaaaaaac

SEQ ID NO: 2012 - RNA, 19 nt, artificial
  Oligomer
ggagauagaaacaacagga

SEQ ID NO: 2013 - RNA, 19 nt, artificial
  Oligomer
cggcaugugaggaucaaaa

SEQ ID NO: 2014 - RNA, 19 nt, artificial
  Oligomer
cauugaaagucuuggucaa

SEQ ID NO: 2015 - RNA, 19 nt, artificial
  Oligomer
ggcaugugaggaucaaaaa

SEQ ID NO: 2016 - RNA, 19 nt, artificial
  Oligomer
cagaguacagcaaguggaa

SEQ ID NO: 2017 - RNA, 19 nt, artificial
  Oligomer
gggaaaaagacaucaacaa

SEQ ID NO: 2018 - RNA, 19 nt, artificial
  Oligomer
gggagauggaggaaaguga

SEQ ID NO: 2019 - RNA, 19 nt, artificial
  Oligomer
ggagauggaggaaagugau

SEQ ID NO: 2020 - RNA, 19 nt, artificial
  Oligomer
aaaggagauagaaacaaca

SEQ ID NO: 2021 - RNA, 19 nt, artificial
  Oligomer
gccucauuccugcuuuaaa

SEQ ID NO: 2022 - RNA, 19 nt, artificial
  Oligomer
aaauuccaccaguaugcaa

SEQ ID NO: 2023 - RNA, 19 nt, artificial
  Oligomer
ggccauggaacaucccaaa

SEQ ID NO: 2024 - RNA, 19 nt, artificial
  Oligomer
gguccauuaugacucccaa

SEQ ID NO: 2025 - RNA, 19 nt, artificial
  Oligomer
cgguaacaaaggagauaga

SEQ ID NO: 2026 - RNA, 19 nt, artificial
  Oligomer
cuuuguagcgagucgaaaa

SEQ ID NO: 2027 - RNA, 19 nt, artificial
  Oligomer
cuuggaaauuucuguucaa

SEQ ID NO: 2028 - RNA, 19 nt, artificial
  Oligomer
ccagaagcgcuaucacgaa

SEQ ID NO: 2029 - RNA, 19 nt, artificial
  Oligomer
ccuguaugcugaugcgcaa

SEQ ID NO: 2030 - RNA, 19 nt, artificial
  Oligomer
ccugcuuuguaaagccaua

SEQ ID NO: 2031 - RNA, 19 nt, artificial
  Oligomer
gccuuuggaccucagcaaa

SEQ ID NO: 2032 - RNA, 19 nt, artificial
  Oligomer
guuugauguccgaggcaaa

SEQ ID NO: 2033 - RNA, 19 nt, artificial
  Oligomer
cccuggcaauggagagaaa

SEQ ID NO: 2034 - RNA, 19 nt, artificial
  Oligomer
ccaaauuccaccaguaugc

SEQ ID NO: 2035 - RNA, 19 nt, artificial
  Oligomer
ccuuguguacaguuauuua

SEQ ID NO: 2036 - RNA, 19 nt, artificial
  Oligomer
cuucaaagaggcaaaaaua

SEQ ID NO: 2037 - RNA, 19 nt, artificial
  Oligomer
cgcucuucaugcugaaaga

SEQ ID NO: 2038 - RNA, 19 nt, artificial
  Oligomer
cuggcaagugggugaaaga

SEQ ID NO: 2039 - RNA, 19 nt, artificial
  Oligomer
ccaagaacguguucaccau

SEQ ID NO: 2040 - RNA, 19 nt, artificial
  Oligomer
ggcaauggagagaaacuga

SEQ ID NO: 2041 - RNA, 19 nt, artificial
  Oligomer
cagagacaggaaaaucaga

SEQ ID NO: 2042 - RNA, 19 nt, artificial
  Oligomer
caauauuacggcuccuuca

SEQ ID NO: 2043 - RNA, 19 nt, artificial
  Oligomer
agaugagcuucuaccucaa

SEQ ID NO: 2044 - RNA, 19 nt, artificial
  Oligomer
gcgggaugacuuuccaaga

SEQ ID NO: 2045 - RNA, 19 nt, artificial
  Oligomer
cagcgggaugacuuuccaa

SEQ ID NO: 2046 - RNA, 19 nt, artificial
  Oligomer
cagguagaggccuggaaaa

SEQ ID NO: 2047 - RNA, 19 nt, artificial
  Oligomer
aggcugucguugagaucaa

SEQ ID NO: 2048 - RNA, 19 nt, artificial
  Oligomer
gguggaagcgguaacaaag

SEQ ID NO: 2049 - RNA, 19 nt, artificial
  Oligomer
aagugaccugcuuuguaaa

SEQ ID NO: 2050 - RNA, 19 nt, artificial
  Oligomer
agguugucugcauggauaa

SEQ ID NO: 2051 - RNA, 19 nt, artificial
  Oligomer
ccgaaguucucaaggcaca

SEQ ID NO: 2052 - RNA, 19 nt, artificial
  Oligomer
uucgggaacuggagcuaaa

SEQ ID NO: 2053 - RNA, 19 nt, artificial
  Oligomer
agugguuucgggaacugga

SEQ ID NO: 2054 - RNA, 19 nt, artificial
  Oligomer
cccuuuacuugaccuccua

SEQ ID NO: 2055 - RNA, 19 nt, artificial
  Oligomer
agcugaaauugaaugagga

SEQ ID NO: 2056 - RNA, 19 nt, artificial
  Oligomer
gcagcaugcaugccaagaa

SEQ ID NO: 2057 - RNA, 19 nt, artificial
  Oligomer
guacguuuggcaauggaga

SEQ ID NO: 2058 - RNA, 19 nt, artificial
  Oligomer
cccgggaaauguuugaaca

SEQ ID NO: 2059 - RNA, 19 nt, artificial
  Oligomer
aauuccaccaguaugcaau

SEQ ID NO: 2060 - RNA, 19 nt, artificial
  Oligomer
ccuuuacuugaccuccuaa

SEQ ID NO: 2061 - RNA, 19 nt, artificial
  Oligomer
agauaucuuuggugcugua

SEQ ID NO: 2062 - RNA, 19 nt, artificial
  Oligomer
gaaguacaugcagaaugaa

SEQ ID NO: 2063 - RNA, 19 nt, artificial
  Oligomer
gugcguuacuccaccaaca

SEQ ID NO: 2064 - RNA, 19 nt, artificial
  Oligomer
gguaacaaaggagauagaa

SEQ ID NO: 2065 - RNA, 19 nt, artificial
  Oligomer
aguuauuuaugccucugua

SEQ ID NO: 2066 - RNA, 19 nt, artificial
  Oligomer
cgcaccacuguguauuuaa

SEQ ID NO: 2067 - RNA, 19 nt, artificial
  Oligomer
cuuuguaaagccauagaga

SEQ ID NO: 2068 - RNA, 19 nt, artificial
  Oligomer
gguggugaccaguacguuu

SEQ ID NO: 2069 - RNA, 19 nt, artificial
  Oligomer
aguacaugcagaaugaaua

SEQ ID NO: 2070 - RNA, 19 nt, artificial
  Oligomer
cauaguuuccagaagcaga

SEQ ID NO: 2071 - RNA, 19 nt, artificial
  Oligomer
gacccugagcucuucgaaa

SEQ ID NO: 2072 - RNA, 19 nt, artificial
  Oligomer
acggcaugugaggaucaaa

SEQ ID NO: 2073 - RNA, 19 nt, artificial
  Oligomer
caagguugucugcauggau

SEQ ID NO: 2074 - RNA, 19 nt, artificial
  Oligomer
guagcgagucgaaaacuga

SEQ ID NO: 2075 - RNA, 19 nt, artificial
  Oligomer
aggagaaugggccuggaaa

SEQ ID NO: 2076 - RNA, 19 nt, artificial
  Oligomer
aggcaaaaauagaggaaca

SEQ ID NO: 2077 - RNA, 19 nt, artificial
  Oligomer
uguucaccaugaggcucaa

SEQ ID NO: 2078 - RNA, 19 nt, artificial
  Oligomer
cagaauccuucaugaagua

SEQ ID NO: 2079 - RNA, 19 nt, artificial
  Oligomer
gggaaauguuugaacacau

SEQ ID NO: 2080 - RNA, 19 nt, artificial
  Oligomer
gcuccuucaaagaggcaaa

SEQ ID NO: 2081 - RNA, 19 nt, artificial
  Oligomer
cuggucccuuggagacaaa

SEQ ID NO: 2082 - RNA, 19 nt, artificial
  Oligomer
aagcggagacccaagagaa

SEQ ID NO: 2083 - RNA, 19 nt, artificial
  Oligomer
aaggccaaagggauuuuaa

SEQ ID NO: 2084 - RNA, 19 nt, artificial
  Oligomer
uguucaagaccaaauucca

SEQ ID NO: 2085 - RNA, 19 nt, artificial
  Oligomer
gacaaaaucuuaaaugcca

SEQ ID NO: 2086 - RNA, 19 nt, artificial
  Oligomer
cuuugcucaugacauugau

SEQ ID NO: 2087 - RNA, 19 nt, artificial
  Oligomer
caguacguuuggcaaugga

SEQ ID NO: 2088 - RNA, 19 nt, artificial
  Oligomer
ugaccaguacguuuggcaa

SEQ ID NO: 2089 - RNA, 19 nt, artificial
  Oligomer
gaagcgguaacaaaggaga

SEQ ID NO: 2090 - RNA, 19 nt, artificial
  Oligomer
gauggaacuugcugcugag

SEQ ID NO: 2091 - RNA, 19 nt, artificial
  Oligomer
acuauuucuuucagcucaa

SEQ ID NO: 2092 - RNA, 19 nt, artificial
  Oligomer
cccucagaguacagcaagu

SEQ ID NO: 2093 - RNA, 19 nt, artificial
  Oligomer
gaaucuacaaaguccgaca

SEQ ID NO: 2094 - RNA, 19 nt, artificial
  Oligomer
aggagaugcugaacuacgu

SEQ ID NO: 2095 - RNA, 19 nt, artificial
  Oligomer
cugcagaauccuucaugaa

SEQ ID NO: 2096 - RNA, 19 nt, artificial
  Oligomer
gaaaaagacaucaacaaca

SEQ ID NO: 2097 - RNA, 19 nt, artificial
  Oligomer
aaucgcucuucaugcugaa

SEQ ID NO: 2098 - RNA, 19 nt, artificial
  Oligomer
uggagagaaacugaagaaa

SEQ ID NO: 2099 - RNA, 19 nt, artificial
  Oligomer
ucagguagaggccuggaaa

SEQ ID NO: 2100 - RNA, 19 nt, artificial
  Oligomer
cgaauuugucaaccaauau

SEQ ID NO: 2101 - RNA, 19 nt, artificial
  Oligomer
caagcuaucgaauuuguca

SEQ ID NO: 2102 - RNA, 19 nt, artificial
  Oligomer
caagugggugaaagaugga

SEQ ID NO: 2103 - RNA, 19 nt, artificial
  Oligomer
cugccggcacagaacuuaa

SEQ ID NO: 2104 - RNA, 19 nt, artificial
  Oligomer
cccagguucuacuccauca

SEQ ID NO: 2105 - RNA, 19 nt, artificial
  Oligomer
guuugaacacaucugcaga

SEQ ID NO: 2106 - RNA, 19 nt, artificial
  Oligomer
gggaaagaagucuccagaa

SEQ ID NO: 2107 - RNA, 19 nt, artificial
  Oligomer
aauuucuguucaagaccaa

SEQ ID NO: 2108 - RNA, 19 nt, artificial
  Oligomer
agauaagugacauaaguga

SEQ ID NO: 2109 - RNA, 19 nt, artificial
  Oligomer
cauuccuggaggugcuaga

SEQ ID NO: 2110 - RNA, 19 nt, artificial
  Oligomer
cguuugauguccgaggcaa

SEQ ID NO: 2111 - RNA, 19 nt, artificial
  Oligomer
ugcgacagagacaggaaaa

SEQ ID NO: 2112 - RNA, 19 nt, artificial
  Oligomer
uugcgacagagacaggaaa

SEQ ID NO: 2113 - RNA, 19 nt, artificial
  Oligomer
agcagaaugugaccaucau

SEQ ID NO: 2114 - RNA, 19 nt, artificial
  Oligomer
aguucuagacagucccgaa

SEQ ID NO: 2115 - RNA, 19 nt, artificial
  Oligomer
cgggaaagaagucuccaga

SEQ ID NO: 2116 - RNA, 19 nt, artificial
  Oligomer
gauggagauauuuacauga

SEQ ID NO: 2117 - RNA, 19 nt, artificial
  Oligomer
ccuugauggagauauuuac

SEQ ID NO: 2118 - RNA, 19 nt, artificial
  Oligomer
agauggaacuugcugcuga

SEQ ID NO: 2119 - RNA, 19 nt, artificial
  Oligomer
cacagaacuuaaggaugga

SEQ ID NO: 2120 - RNA, 19 nt, artificial
  Oligomer
cacagaagagccugagaga

SEQ ID NO: 2121 - RNA, 19 nt, artificial
  Oligomer
gcuacugggucagugacaa

SEQ ID NO: 2122 - RNA, 19 nt, artificial
  Oligomer
cuacaaaguccgacaucca

SEQ ID NO: 2123 - RNA, 19 nt, artificial
  Oligomer
cagccugugagacguuuga

SEQ ID NO: 2124 - RNA, 19 nt, artificial
  Oligomer
gcgacagagacaggaaaau

SEQ ID NO: 2125 - RNA, 19 nt, artificial
  Oligomer
ccuucaugaaguacaugca

SEQ ID NO: 2126 - RNA, 19 nt, artificial
  Oligomer
uggccaacaugcugcuuga

SEQ ID NO: 2127 - RNA, 19 nt, artificial
  Oligomer
acuuuguagcgagucgaaa

SEQ ID NO: 2128 - RNA, 19 nt, artificial
  Oligomer
aacuuuguagcgagucgaa

SEQ ID NO: 2129 - RNA, 19 nt, artificial
  Oligomer
ccuuggaaauuucuguuca

SEQ ID NO: 2130 - RNA, 19 nt, artificial
  Oligomer
gcugagugcaccacuucaa

SEQ ID NO: 2131 - RNA, 19 nt, artificial
  Oligomer
acaaaaucuuaaaugccag

SEQ ID NO: 2132 - RNA, 19 nt, artificial
  Oligomer
ccggcacagaacuuaagga

SEQ ID NO: 2133 - RNA, 19 nt, artificial
  Oligomer
uaaagcugccggcacagaa

SEQ ID NO: 2134 - RNA, 19 nt, artificial
  Oligomer
cuuacgaggcgaagaagga

SEQ ID NO: 2135 - RNA, 19 nt, artificial
  Oligomer
ccaaggucuauguucagga

SEQ ID NO: 2136 - RNA, 19 nt, artificial
  Oligomer
uugucugcauggauaagua

SEQ ID NO: 2137 - RNA, 19 nt, artificial
  Oligomer
uauucagcugugccuucaa

SEQ ID NO: 2138 - RNA, 19 nt, artificial
  Oligomer
ucaugaaguacaugcagaa

SEQ ID NO: 2139 - RNA, 19 nt, artificial
  Oligomer
ccuucaaagaggcaaaaau

SEQ ID NO: 2140 - RNA, 19 nt, artificial
  Oligomer
ccaagacacacuucaccau

SEQ ID NO: 2141 - RNA, 19 nt, artificial
  Oligomer
caauggagagaaacugaag

SEQ ID NO: 2142 - RNA, 19 nt, artificial
  Oligomer
ccaagguugucugcaugga

SEQ ID NO: 2143 - RNA, 19 nt, artificial
  Oligomer
ugcugaugcgcaagacaau

SEQ ID NO: 2144 - RNA, 19 nt, artificial
  Oligomer
uguggaaugcucagcucau

SEQ ID NO: 2145 - RNA, 19 nt, artificial
  Oligomer
ucaaagaggcaaaaauaga

SEQ ID NO: 2146 - RNA, 19 nt, artificial
  Oligomer
ucaagaccaaauuccacca

SEQ ID NO: 2147 - RNA, 19 nt, artificial
  Oligomer
uggaaauuucuguucaaga

SEQ ID NO: 2148 - RNA, 19 nt, artificial
  Oligomer
agauggccuguccuuggaa

SEQ ID NO: 2149 - RNA, 19 nt, artificial
  Oligomer
ugagcucaaauccagauaa

SEQ ID NO: 2150 - RNA, 19 nt, artificial
  Oligomer
ugcugaaagagcucaacaa

SEQ ID NO: 2151 - RNA, 19 nt, artificial
  Oligomer
aauccuucaugaaguacau

SEQ ID NO: 2152 - RNA, 19 nt, artificial
  Oligomer
cgggaacuggagcuaaagu

SEQ ID NO: 2153 - RNA, 19 nt, artificial
  Oligomer
agaggcaaaaauagaggaa

SEQ ID NO: 2154 - RNA, 19 nt, artificial
  Oligomer
guccauuaugacucccaaa

SEQ ID NO: 2155 - RNA, 19 nt, artificial
  Oligomer
accaaauuccaccaguaug

SEQ ID NO: 2156 - RNA, 19 nt, artificial
  Oligomer
gcaagugggugaaagaugg

SEQ ID NO: 2157 - RNA, 19 nt, artificial
  Oligomer
gagacaaaaucuuaaaugc

SEQ ID NO: 2158 - RNA, 19 nt, artificial
  Oligomer
gaagcgcuaucacgaagau

SEQ ID NO: 2159 - RNA, 19 nt, artificial
  Oligomer
aggaggagaugcuggagau

SEQ ID NO: 2160 - RNA, 19 nt, artificial
  Oligomer
agcccagguucuacuccau

SEQ ID NO: 2161 - RNA, 19 nt, artificial
  Oligomer
gcgccuuugcucaugacau

SEQ ID NO: 2162 - RNA, 19 nt, artificial
  Oligomer
ucaugcugaaagagcucaa

SEQ ID NO: 2163 - RNA, 19 nt, artificial
  Oligomer
gagagauuccauugaaagu

SEQ ID NO: 2164 - RNA, 19 nt, artificial
  Oligomer
uggccauggaacaucccaa

SEQ ID NO: 2165 - RNA, 19 nt, artificial
  Oligomer
aggguggaagcgguaacaa

SEQ ID NO: 2166 - RNA, 19 nt, artificial
  Oligomer
auauuacggcuccuucaaa

SEQ ID NO: 2167 - RNA, 19 nt, artificial
  Oligomer
cccuccagaugagcuucua

SEQ ID NO: 2168 - RNA, 19 nt, artificial
  Oligomer
acaggaugaccuucaguau

SEQ ID NO: 2169 - RNA, 19 nt, artificial
  Oligomer
cuugauggagauauuuaca

SEQ ID NO: 2170 - RNA, 19 nt, artificial
  Oligomer
gggucuucccuguaugauu

SEQ ID NO: 2171 - RNA, 19 nt, artificial
  Oligomer
ggugaaagauggaacuugc

SEQ ID NO: 2172 - RNA, 19 nt, artificial
  Oligomer
cagagaacucagccucauu

SEQ ID NO: 2173 - RNA, 19 nt, artificial
  Oligomer
cauggcucaacagccugaa

SEQ ID NO: 2174 - RNA, 19 nt, artificial
  Oligomer
ccaagcucuacaccuccaa

SEQ ID NO: 2175 - RNA, 19 nt, artificial
  Oligomer
ugaccaucauggaccacca

SEQ ID NO: 2176 - RNA, 19 nt, artificial
  Oligomer
ucuucgaaaucccaccuga

SEQ ID NO: 2177 - RNA, 19 nt, artificial
  Oligomer
cacggcaugugaggaucaa

SEQ ID NO: 2178 - RNA, 19 nt, artificial
  Oligomer
ccaagcugaaauugaauga

SEQ ID NO: 2179 - RNA, 19 nt, artificial
  Oligomer
ugccaagcugaaauugaau

SEQ ID NO: 2180 - RNA, 19 nt, artificial
  Oligomer
gcaugaccuugguguuugg

SEQ ID NO: 2181 - RNA, 19 nt, artificial
  Oligomer
ucagcagcaugcaugccaa

SEQ ID NO: 2182 - RNA, 19 nt, artificial
  Oligomer
ccugguuugacuguccuua

SEQ ID NO: 2183 - RNA, 19 nt, artificial
  Oligomer
ccauugaaagucuugguca

SEQ ID NO: 2184 - RNA, 19 nt, artificial
  Oligomer
augucuggcaggacgagaa

SEQ ID NO: 2185 - RNA, 19 nt, artificial
  Oligomer
gacugggcaguucuagaca

SEQ ID NO: 2186 - RNA, 19 nt, artificial
  Oligomer
ggcaaaaauagaggaacau

SEQ ID NO: 2187 - RNA, 19 nt, artificial
  Oligomer
caaaaguuugaccagagga

SEQ ID NO: 2188 - RNA, 19 nt, artificial
  Oligomer
accucagcaagcagcagaa

SEQ ID NO: 2189 - RNA, 19 nt, artificial
  Oligomer
ggaaaaagacaucaacaac

SEQ ID NO: 2190 - RNA, 19 nt, artificial
  Oligomer
cggcacagaacuuaaggau

SEQ ID NO: 2191 - RNA, 19 nt, artificial
  Oligomer
gacuauuucuuucagcuca

SEQ ID NO: 2192 - RNA, 19 nt, artificial
  Oligomer
cgaggacuauuucuuucag

SEQ ID NO: 2193 - RNA, 19 nt, artificial
  Oligomer
ucaccuacuuccuggacau

SEQ ID NO: 2194 - RNA, 19 nt, artificial
  Oligomer
cacagugaagaacaucuga

SEQ ID NO: 2195 - RNA, 19 nt, artificial
  Oligomer
ccauccucuuugcgacaga

SEQ ID NO: 2196 - RNA, 19 nt, artificial
  Oligomer
gucucuuccugguuugacu

SEQ ID NO: 2197 - RNA, 19 nt, artificial
  Oligomer
agcucaucuucgccaccaa

SEQ ID NO: 2198 - RNA, 19 nt, artificial
  Oligomer
aggagauagaaacaacagg

SEQ ID NO: 2199 - RNA, 19 nt, artificial
  Oligomer
caaaaauagaggaacaucu

SEQ ID NO: 2200 - RNA, 19 nt, artificial
  Oligomer
caaagaggcaaaaauagag

SEQ ID NO: 2201 - RNA, 19 nt, artificial
  Oligomer
aauauuacggcuccuucaa

SEQ ID NO: 2202 - RNA, 19 nt, artificial
  Oligomer
aagcuaucgaauuugucaa

SEQ ID NO: 2203 - RNA, 19 nt, artificial
  Oligomer
ccauuaugacucccaaaag

SEQ ID NO: 2204 - RNA, 19 nt, artificial
  Oligomer
gcaugugaggaucaaaaac

SEQ ID NO: 2205 - RNA, 19 nt, artificial
  Oligomer
cuccagaaucucuggucaa

SEQ ID NO: 2206 - RNA, 19 nt, artificial
  Oligomer
guggagacgggaaagaagu

SEQ ID NO: 2207 - RNA, 19 nt, artificial
  Oligomer
caccaguaugcaaugaaug

SEQ ID NO: 2208 - RNA, 19 nt, artificial
  Oligomer
uggucccuuggagacaaaa

SEQ ID NO: 2209 - RNA, 19 nt, artificial
  Oligomer
cgaagauaucuuuggugcu

SEQ ID NO: 2210 - RNA, 19 nt, artificial
  Oligomer
gaugagaguggcagcuacu

SEQ ID NO: 2211 - RNA, 19 nt, artificial
  Oligomer
aagguauccuggagcgagu

SEQ ID NO: 2212 - RNA, 19 nt, artificial
  Oligomer
aauccagauaagugacaua

SEQ ID NO: 2213 - RNA, 19 nt, artificial
  Oligomer
aauggagagaaacugaaga

SEQ ID NO: 2214 - RNA, 19 nt, artificial
  Oligomer
gacagagacaggaaaauca

SEQ ID NO: 2215 - RNA, 19 nt, artificial
  Oligomer
cucuuugccuguaugcuga

SEQ ID NO: 2216 - RNA, 19 nt, artificial
  Oligomer
aagucuuggucaaagcugu

SEQ ID NO: 2217 - RNA, 19 nt, artificial
  Oligomer
agagaagagagauuccauu

SEQ ID NO: 2218 - RNA, 19 nt, artificial
  Oligomer
aagagaagagagauuccau

SEQ ID NO: 2219 - RNA, 19 nt, artificial
  Oligomer
ccguguuucaccaggagau

SEQ ID NO: 2220 - RNA, 19 nt, artificial
  Oligomer
ccuucaauggcugguacau

SEQ ID NO: 2221 - RNA, 19 nt, artificial
  Oligomer
guguggaaugcucagcuca

SEQ ID NO: 2222 - RNA, 19 nt, artificial
  Oligomer
cacaggaugaccuucagua

SEQ ID NO: 2223 - RNA, 19 nt, artificial
  Oligomer
gaggcaaacagcacauuca

SEQ ID NO: 2224 - RNA, 19 nt, artificial
  Oligomer
ugaagaaaucgcucuucau

SEQ ID NO: 2225 - RNA, 19 nt, artificial
  Oligomer
agaagagagauuccauuga

SEQ ID NO: 2226 - RNA, 19 nt, artificial
  Oligomer
agacccaagagaagagaga

SEQ ID NO: 2227 - RNA, 19 nt, artificial
  Oligomer
ggaaaacccaugucuggca

SEQ ID NO: 2228 - RNA, 19 nt, artificial
  Oligomer
gguacaugggcacagagau

SEQ ID NO: 2229 - RNA, 19 nt, artificial
  Oligomer
gcguuacuccaccaacaau

SEQ ID NO: 2230 - RNA, 19 nt, artificial
  Oligomer
aagcgguaacaaaggagau

SEQ ID NO: 2231 - RNA, 19 nt, artificial
  Oligomer
gacacaggaugaccuucag

SEQ ID NO: 2232 - RNA, 19 nt, artificial
  Oligomer
auuccaccaguaugcaaug

SEQ ID NO: 2233 - RNA, 19 nt, artificial
  Oligomer
uaaaaaacuaacacccagu

SEQ ID NO: 2234 - RNA, 19 nt, artificial
  Oligomer
ggagacaaaaucuuaaaug

SEQ ID NO: 2235 - RNA, 19 nt, artificial
  Oligomer
ccucuuugcgacagagaca

SEQ ID NO: 2236 - RNA, 19 nt, artificial
  Oligomer
ggucaaagcugugcucuuu

SEQ ID NO: 2237 - RNA, 19 nt, artificial
  Oligomer
cgaaguucucaaggcacag

SEQ ID NO: 2238 - RNA, 19 nt, artificial
  Oligomer
ccaacaugcugcuugaggu

SEQ ID NO: 2239 - RNA, 19 nt, artificial
  Oligomer
cgggaaauguuugaacaca

SEQ ID NO: 2240 - RNA, 19 nt, artificial
  Oligomer
aaagggauuuuaacuugca

SEQ ID NO: 2241 - RNA, 19 nt, artificial
  Oligomer
ucguggagacgggaaagaa

SEQ ID NO: 2242 - RNA, 19 nt, artificial
  Oligomer
uuaaaaaacuaacacccag

SEQ ID NO: 2243 - RNA, 19 nt, artificial
  Oligomer
cuguguauuuaacugccuu

SEQ ID NO: 2244 - RNA, 19 nt, artificial
  Oligomer
gcuaucgcaccacugugua

SEQ ID NO: 2245 - RNA, 19 nt, artificial
  Oligomer
gugggugaaagauggaacu

SEQ ID NO: 2246 - RNA, 19 nt, artificial
  Oligomer
caucaagcccuuuacuuga

SEQ ID NO: 2247 - RNA, 19 nt, artificial
  Oligomer
ugcagcacauggcucaaca

SEQ ID NO: 2248 - RNA, 19 nt, artificial
  Oligomer
ugagacguuugauguccga

SEQ ID NO: 2249 - RNA, 19 nt, artificial
  Oligomer
acaucugagcucaaaucca

SEQ ID NO: 2250 - RNA, 19 nt, artificial
  Oligomer
gaauccuucaugaaguaca

SEQ ID NO: 2251 - RNA, 19 nt, artificial
  Oligomer
augugaccaucauggacca

SEQ ID NO: 2252 - RNA, 19 nt, artificial
  Oligomer
gcuacaacauccuggagga

SEQ ID NO: 2253 - RNA, 19 nt, artificial
  Oligomer
agacacgugcguuacucca

SEQ ID NO: 2254 - RNA, 19 nt, artificial
  Oligomer
agcgguaacaaaggagaua

SEQ ID NO: 2255 - RNA, 19 nt, artificial
  Oligomer
cuaucgaauuugucaacca

SEQ ID NO: 2256 - RNA, 19 nt, artificial
  Oligomer
aaucucuggucaagcugga

SEQ ID NO: 2257 - RNA, 19 nt, artificial
  Oligomer
cccuguaugauuccuugau

SEQ ID NO: 2258 - RNA, 19 nt, artificial
  Oligomer
guuauuuaugccucuguau

SEQ ID NO: 2259 - RNA, 19 nt, artificial
  Oligomer
uauuuaacugccuugugua

SEQ ID NO: 2260 - RNA, 19 nt, artificial
  Oligomer
aagugggugaaagauggaa

SEQ ID NO: 2261 - RNA, 19 nt, artificial
  Oligomer
ggucccuuggagacaaaau

SEQ ID NO: 2262 - RNA, 19 nt, artificial
  Oligomer
ccagcucugcauuaucuga

SEQ ID NO: 2263 - RNA, 19 nt, artificial
  Oligomer
uggaggugcuagaggaguu

SEQ ID NO: 2264 - RNA, 19 nt, artificial
  Oligomer
gaagagccugagagacaga

SEQ ID NO: 2265 - RNA, 19 nt, artificial
  Oligomer
auggauaaguacaggcuga

SEQ ID NO: 2266 - RNA, 19 nt, artificial
  Oligomer
gcagaauccuucaugaagu

SEQ ID NO: 2267 - RNA, 19 nt, artificial
  Oligomer
ucggcugcagaauccuuca

SEQ ID NO: 2268 - RNA, 19 nt, artificial
  Oligomer
uugagguggccauggaaca

SEQ ID NO: 2269 - RNA, 19 nt, artificial
  Oligomer
cugcccgggaaauguuuga

SEQ ID NO: 2270 - RNA, 19 nt, artificial
  Oligomer
caccauaaggccaaaggga

SEQ ID NO: 2271 - RNA, 19 nt, artificial
  Oligomer
gccuguccuuggaaauuuc

SEQ ID NO: 2272 - RNA, 19 nt, artificial
  Oligomer
cuuuggugcuguauuuccu

SEQ ID NO: 2273 - RNA, 19 nt, artificial
  Oligomer
ucagaguacagcaagugga

SEQ ID NO: 2274 - RNA, 19 nt, artificial
  Oligomer
ggcucaaaucucggcagaa

SEQ ID NO: 2275 - RNA, 19 nt, artificial
  Oligomer
agaacaucugagcucaaau

SEQ ID NO: 2276 - RNA, 19 nt, artificial
  Oligomer
cugaaagagcucaacaaca

SEQ ID NO: 2277 - RNA, 19 nt, artificial
  Oligomer
auggagagaaacugaagaa

SEQ ID NO: 2278 - RNA, 19 nt, artificial
  Oligomer
cuggcaauggagagaaacu

SEQ ID NO: 2279 - RNA, 19 nt, artificial
  Oligomer
uuugcgacagagacaggaa

SEQ ID NO: 2280 - RNA, 19 nt, artificial
  Oligomer
cugugcucuuugccuguau

SEQ ID NO: 2281 - RNA, 19 nt, artificial
  Oligomer
gacccaagagaagagagau

SEQ ID NO: 2282 - RNA, 19 nt, artificial
  Oligomer
agaggccuggaaaacccau

SEQ ID NO: 2283 - RNA, 19 nt, artificial
  Oligomer
cguugagaucaacauugcu

SEQ ID NO: 2284 - RNA, 19 nt, artificial
  Oligomer
auacgagugguuucgggaa

SEQ ID NO: 2285 - RNA, 19 nt, artificial
  Oligomer
ccaacguggaauucacuca

SEQ ID NO: 2286 - RNA, 19 nt, artificial
  Oligomer
ucugcagacacgugcguua

SEQ ID NO: 2287 - RNA, 19 nt, artificial
  Oligomer
agauagaaacaacaggaac

SEQ ID NO: 2288 - RNA, 19 nt, artificial
  Oligomer
cuuuaaaaucucucggcca

SEQ ID NO: 2289 - RNA, 19 nt, artificial
  Oligomer
auuuuaacuugcaggucca

SEQ ID NO: 2290 - RNA, 19 nt, artificial
  Oligomer
ggaugacuuuccaagacac

SEQ ID NO: 2291 - RNA, 19 nt, artificial
  Oligomer
uaugauuccuugauggaga

SEQ ID NO: 2292 - RNA, 19 nt, artificial
  Oligomer
ucaagagccagaagcgcua

SEQ ID NO: 2293 - RNA, 19 nt, artificial
  Oligomer
ugaaugaggagcaggucga

SEQ ID NO: 2294 - RNA, 19 nt, artificial
  Oligomer
guggcugccaagcugaaau

SEQ ID NO: 2295 - RNA, 19 nt, artificial
  Oligomer
gcccaaggucuauguucag

SEQ ID NO: 2296 - RNA, 19 nt, artificial
  Oligomer
ucccauccuugcauccuca

SEQ ID NO: 2297 - RNA, 19 nt, artificial
  Oligomer
uacagcaaguggaaguuca

SEQ ID NO: 2298 - RNA, 19 nt, artificial
  Oligomer
ggaacucuccugugaggau

SEQ ID NO: 2299 - RNA, 19 nt, artificial
  Oligomer
aucucggcagaaucuacaa

SEQ ID NO: 2300 - RNA, 19 nt, artificial
  Oligomer
ggcaaacagcacauucaga

SEQ ID NO: 2301 - RNA, 19 nt, artificial
  Oligomer
cgugcaaaccuucaaggca

SEQ ID NO: 2302 - RNA, 19 nt, artificial
  Oligomer
cucaugacauugaucagaa

SEQ ID NO: 2303 - RNA, 19 nt, artificial
  Oligomer
cuguugguggugaccagua

SEQ ID NO: 2304 - RNA, 19 nt, artificial
  Oligomer
caggaaaaucagaggcgcu

SEQ ID NO: 2305 - RNA, 19 nt, artificial
  Oligomer
aaguacaugcagaaugaau

SEQ ID NO: 2306 - RNA, 19 nt, artificial
  Oligomer
ggaacaucccaaauacgag

SEQ ID NO: 2307 - RNA, 19 nt, artificial
  Oligomer
ugcguuacuccaccaacaa

SEQ ID NO: 2308 - RNA, 19 nt, artificial
  Oligomer
aaggagauagaaacaacag

SEQ ID NO: 2309 - RNA, 19 nt, artificial
  Oligomer
cagaugagcuucuaccuca

SEQ ID NO: 2310 - RNA, 19 nt, artificial
  Oligomer
cauuaugacucccaaaagu

SEQ ID NO: 2311 - RNA, 19 nt, artificial
  Oligomer
cuucaguaucacaaccuca

SEQ ID NO: 2312 - RNA, 19 nt, artificial
  Oligomer
auuccuugauggagauauu

SEQ ID NO: 2313 - RNA, 19 nt, artificial
  Oligomer
cuaucgcaccacuguguau

SEQ ID NO: 2314 - RNA, 19 nt, artificial
  Oligomer
uaacaaguagcacccugga

SEQ ID NO: 2315 - RNA, 19 nt, artificial
  Oligomer
gcgcuaucacgaagauauc

SEQ ID NO: 2316 - RNA, 19 nt, artificial
  Oligomer
gcugccaagcugaaauuga

SEQ ID NO: 2317 - RNA, 19 nt, artificial
  Oligomer
caaggucuauguucaggac

SEQ ID NO: 2318 - RNA, 19 nt, artificial
  Oligomer
ccuuugcucaugacauuga

SEQ ID NO: 2319 - RNA, 19 nt, artificial
  Oligomer
cauugcugugcuccauagu

SEQ ID NO: 2320 - RNA, 19 nt, artificial
  Oligomer
gccauggaacaucccaaau

SEQ ID NO: 2321 - RNA, 19 nt, artificial
  Oligomer
ugagguggccauggaacau

SEQ ID NO: 2322 - RNA, 19 nt, artificial
  Oligomer
ugacgggagaugagcucau

SEQ ID NO: 2323 - RNA, 19 nt, artificial
  Oligomer
aacaaaggagauagaaaca

SEQ ID NO: 2324 - RNA, 19 nt, artificial
  Oligomer
uccauuaugacucccaaaa

SEQ ID NO: 2325 - RNA, 19 nt, artificial
  Oligomer
cuuuccaagacacacuuca

SEQ ID NO: 2326 - RNA, 19 nt, artificial
  Oligomer
ugccuuguguacaguuauu

SEQ ID NO: 2327 - RNA, 19 nt, artificial
  Oligomer
gugaaagauggaacuugcu

SEQ ID NO: 2328 - RNA, 19 nt, artificial
  Oligomer
gcccuuuacuugaccuccu

SEQ ID NO: 2329 - RNA, 19 nt, artificial
  Oligomer
cucaagucuuauuuccuca

SEQ ID NO: 2330 - RNA, 19 nt, artificial
  Oligomer
ugcauuaucugaggucaca

SEQ ID NO: 2331 - RNA, 19 nt, artificial
  Oligomer
gcugaaauugaaugaggag

SEQ ID NO: 2332 - RNA, 19 nt, artificial
  Oligomer
cacagagauccaccugacu

SEQ ID NO: 2333 - RNA, 19 nt, artificial
  Oligomer
ccagguucuacuccaucag

SEQ ID NO: 2334 - RNA, 19 nt, artificial
  Oligomer
aagcccagguucuacucca

SEQ ID NO: 2335 - RNA, 19 nt, artificial
  Oligomer
ccuacuuccuggacaucac

SEQ ID NO: 2336 - RNA, 19 nt, artificial
  Oligomer
cagaaucuacaaaguccga

SEQ ID NO: 2337 - RNA, 19 nt, artificial
  Oligomer
gccaagaacguguucacca

SEQ ID NO: 2338 - RNA, 19 nt, artificial
  Oligomer
gguugucugcauggauaag

SEQ ID NO: 2339 - RNA, 19 nt, artificial
  Oligomer
gagucagagucaccauccu

SEQ ID NO: 2340 - RNA, 19 nt, artificial
  Oligomer
agaagcagaaugugaccau

SEQ ID NO: 2341 - RNA, 19 nt, artificial
  Oligomer
auaguuuccagaagcagaa

SEQ ID NO: 2342 - RNA, 19 nt, artificial
  Oligomer
ucaacauugcugugcucca

SEQ ID NO: 2343 - RNA, 19 nt, artificial
  Oligomer
accaggcugucguugagau

SEQ ID NO: 2344 - RNA, 19 nt, artificial
  Oligomer
agcgcuacaacauccugga

SEQ ID NO: 2345 - RNA, 19 nt, artificial
  Oligomer
gaacuggagcuaaaguggu

SEQ ID NO: 2346 - RNA, 19 nt, artificial
  Oligomer
acuccaccaacaauggcaa

SEQ ID NO: 2347 - RNA, 19 nt, artificial
  Oligomer
ccgggaaauguuugaacac

SEQ ID NO: 2348 - RNA, 19 nt, artificial
  Oligomer
acaaaggagauagaaacaa

SEQ ID NO: 2349 - RNA, 19 nt, artificial
  Oligomer
uccaccaguaugcaaugaa

SEQ ID NO: 2350 - RNA, 19 nt, artificial
  Oligomer
uggcaagugggugaaagau

SEQ ID NO: 2351 - RNA, 19 nt, artificial
  Oligomer
uggagccagcucugcauua

SEQ ID NO: 2352 - RNA, 19 nt, artificial
  Oligomer
gagcaggucgaggacuauu

SEQ ID NO: 2353 - RNA, 19 nt, artificial
  Oligomer
aggucuauguucaggacau

SEQ ID NO: 2354 - RNA, 19 nt, artificial
  Oligomer
agcccaaggucuauguuca

SEQ ID NO: 2355 - RNA, 19 nt, artificial
  Oligomer
cuuugcgacagagacagga

SEQ ID NO: 2356 - RNA, 19 nt, artificial
  Oligomer
uaugcugaugcgcaagaca

SEQ ID NO: 2357 - RNA, 19 nt, artificial
  Oligomer
auugaaagucuuggucaaa

SEQ ID NO: 2358 - RNA, 19 nt, artificial
  Oligomer
agauuccauugaaagucuu

SEQ ID NO: 2359 - RNA, 19 nt, artificial
  Oligomer
agaaugugaccaucaugga

SEQ ID NO: 2360 - RNA, 19 nt, artificial
  Oligomer
ugucguugagaucaacauu

SEQ ID NO: 2361 - RNA, 19 nt, artificial
  Oligomer
caggcugucguugagauca

SEQ ID NO: 2362 - RNA, 19 nt, artificial
  Oligomer
ggaacuggagcuaaagugg

SEQ ID NO: 2363 - RNA, 19 nt, artificial
  Oligomer
ccugccaacguggaauuca

SEQ ID NO: 2364 - RNA, 19 nt, artificial
  Oligomer
gggagaugagcucaucuuc

SEQ ID NO: 2365 - RNA, 19 nt, artificial
  Oligomer
ggaagcgguaacaaaggag

SEQ ID NO: 2366 - RNA, 19 nt, artificial
  Oligomer
gggauuuuaacuugcaggu

SEQ ID NO: 2367 - RNA, 19 nt, artificial
  Oligomer
acuucaccauaaggccaaa

SEQ ID NO: 2368 - RNA, 19 nt, artificial
  Oligomer
gacuuuccaagacacacuu

SEQ ID NO: 2369 - RNA, 19 nt, artificial
  Oligomer
gaugacuuuccaagacaca

SEQ ID NO: 2370 - RNA, 19 nt, artificial
  Oligomer
cucauuccugcuuuaaaau

SEQ ID NO: 2371 - RNA, 19 nt, artificial
  Oligomer
cacuugggucuucccugua

SEQ ID NO: 2372 - RNA, 19 nt, artificial
  Oligomer
cugccuuguguacaguuau

SEQ ID NO: 2373 - RNA, 19 nt, artificial
  Oligomer
ugcugagugcaccacuuca

SEQ ID NO: 2374 - RNA, 19 nt, artificial
  Oligomer
agauggaggaaagugauau

SEQ ID NO: 2375 - RNA, 19 nt, artificial
  Oligomer
ggagccagcucugcauuau

SEQ ID NO: 2376 - RNA, 19 nt, artificial
  Oligomer
ugaaauugaaugaggagca

SEQ ID NO: 2377 - RNA, 19 nt, artificial
  Oligomer
cagaugaggaccacaucua

SEQ ID NO: 2378 - RNA, 19 nt, artificial
  Oligomer
aaguggaaguucaccaaca

SEQ ID NO: 2379 - RNA, 19 nt, artificial
  Oligomer
ucucggcagaaucuacaaa

SEQ ID NO: 2380 - RNA, 19 nt, artificial
  Oligomer
ccaugaggcucaaaucucg

SEQ ID NO: 2381 - RNA, 19 nt, artificial
  Oligomer
cucaaauccagauaaguga

SEQ ID NO: 2382 - RNA, 19 nt, artificial
  Oligomer
ccugugagacguuugaugu

SEQ ID NO: 2383 - RNA, 19 nt, artificial
  Oligomer
cugaagaaaucgcucuuca

SEQ ID NO: 2384 - RNA, 19 nt, artificial
  Oligomer
cccacagugaagaacaucu

SEQ ID NO: 2385 - RNA, 19 nt, artificial
  Oligomer
ccuggaaaacccaugucug

SEQ ID NO: 2386 - RNA, 19 nt, artificial
  Oligomer
ggcugucguugagaucaac

SEQ ID NO: 2387 - RNA, 19 nt, artificial
  Oligomer
cuucgaaaucccaccugac

SEQ ID NO: 2388 - RNA, 19 nt, artificial
  Oligomer
ugagcucuucgaaauccca

SEQ ID NO: 2389 - RNA, 19 nt, artificial
  Oligomer
acgugcguuacuccaccaa

SEQ ID NO: 2390 - RNA, 19 nt, artificial
  Oligomer
cuaccucaagcuaucgaau

SEQ ID NO: 2391 - RNA, 19 nt, artificial
  Oligomer
ucaacaacaauguggagaa

SEQ ID NO: 2392 - RNA, 19 nt, artificial
  Oligomer
acaucaacaacaaugugga

SEQ ID NO: 2393 - RNA, 19 nt, artificial
  Oligomer
uuccaccaguaugcaauga

SEQ ID NO: 2394 - RNA, 19 nt, artificial
  Oligomer
aaauuucuguucaagacca

SEQ ID NO: 2395 - RNA, 19 nt, artificial
  Oligomer
acuugggucuucccuguau

SEQ ID NO: 2396 - RNA, 19 nt, artificial
  Oligomer
gccucaagucuuauuuccu

SEQ ID NO: 2397 - RNA, 19 nt, artificial
  Oligomer
gaccugcuuuguaaagcca

SEQ ID NO: 2398 - RNA, 19 nt, artificial
  Oligomer
agcaggucgaggacuauuu

SEQ ID NO: 2399 - RNA, 19 nt, artificial
  Oligomer
gcaagcccaaggucuaugu

SEQ ID NO: 2400 - RNA, 19 nt, artificial
  Oligomer
cccauccuugcauccucau

SEQ ID NO: 2401 - RNA, 19 nt, artificial
  Oligomer
ucggcagaaucuacaaagu

SEQ ID NO: 2402 - RNA, 19 nt, artificial
  Oligomer
cagcaugcaugccaagaac

SEQ ID NO: 2403 - RNA, 19 nt, artificial
  Oligomer
ucaacaacaaauucaggua

SEQ ID NO: 2404 - RNA, 19 nt, artificial
  Oligomer
gcauggauaaguacaggcu

SEQ ID NO: 2405 - RNA, 19 nt, artificial
  Oligomer
uagcgagucgaaaacugag

SEQ ID NO: 2406 - RNA, 19 nt, artificial
  Oligomer
gaaagucuuggucaaagcu

SEQ ID NO: 2407 - RNA, 19 nt, artificial
  Oligomer
ggagacccaagagaagaga

SEQ ID NO: 2408 - RNA, 19 nt, artificial
  Oligomer
aucagguagaggccuggaa

SEQ ID NO: 2409 - RNA, 19 nt, artificial
  Oligomer
cccuucaauggcugguaca

SEQ ID NO: 2410 - RNA, 19 nt, artificial
  Oligomer
acagucccgaaguucucaa

SEQ ID NO: 2411 - RNA, 19 nt, artificial
  Oligomer
gacagucccgaaguucuca

SEQ ID NO: 2412 - RNA, 19 nt, artificial
  Oligomer
aucucucggccaccuuuga

SEQ ID NO: 2413 - RNA, 19 nt, artificial
  Oligomer
aagaggcaaaaauagagga

SEQ ID NO: 2414 - RNA, 19 nt, artificial
  Oligomer
aaaucucucggccaccuuu

SEQ ID NO: 2415 - RNA, 19 nt, artificial
  Oligomer
agacacacuucaccauaag

SEQ ID NO: 2416 - RNA, 19 nt, artificial
  Oligomer
ccuguaugauuccuugaug

SEQ ID NO: 2417 - RNA, 19 nt, artificial
  Oligomer
ccagccucaagucuuauuu

SEQ ID NO: 2418 - RNA, 19 nt, artificial
  Oligomer
ucacgaagauaucuuuggu

SEQ ID NO: 2419 - RNA, 19 nt, artificial
  Oligomer
gaaauugaaugaggagcag

SEQ ID NO: 2420 - RNA, 19 nt, artificial
  Oligomer
gugacauaagugaccugcu

SEQ ID NO: 2421 - RNA, 19 nt, artificial
  Oligomer
aggaccacaucuaccagga

SEQ ID NO: 2422 - RNA, 19 nt, artificial
  Oligomer
acauggcucaacagccuga

SEQ ID NO: 2423 - RNA, 19 nt, artificial
  Oligomer
agcccucagaguacagcaa

SEQ ID NO: 2424 - RNA, 19 nt, artificial
  Oligomer
aucugagcucaaauccaga

SEQ ID NO: 2425 - RNA, 19 nt, artificial
  Oligomer
aaaucgcucuucaugcuga

SEQ ID NO: 2426 - RNA, 19 nt, artificial
  Oligomer
agagagauuccauugaaag

SEQ ID NO: 2427 - RNA, 19 nt, artificial
  Oligomer
aggaagugggcaggagaau

SEQ ID NO: 2428 - RNA, 19 nt, artificial
  Oligomer
uuucgggaacuggagcuaa

SEQ ID NO: 2429 - RNA, 19 nt, artificial
  Oligomer
gaauucacucagcugugca

SEQ ID NO: 2430 - RNA, 19 nt, artificial
  Oligomer
cugccaacguggaauucac

SEQ ID NO: 2431 - RNA, 19 nt, artificial
  Oligomer
gcuaugcuggcuaccagau

SEQ ID NO: 2432 - RNA, 19 nt, artificial
  Oligomer
ggcuccuucaaagaggcaa

SEQ ID NO: 2433 - RNA, 19 nt, artificial
  Oligomer
gagcuucuaccucaagcua

SEQ ID NO: 2434 - RNA, 19 nt, artificial
  Oligomer
uggucaagcuggaugcaac

SEQ ID NO: 2435 - RNA, 19 nt, artificial
  Oligomer
cuggucaagcuggaugcaa

SEQ ID NO: 2436 - RNA, 19 nt, artificial
  Oligomer
cagcaagcagcagaaugag

SEQ ID NO: 2437 - RNA, 19 nt, artificial
  Oligomer
accaguaugcaaugaaugg

SEQ ID NO: 2438 - RNA, 19 nt, artificial
  Oligomer
ccacuucaagugaccacca

SEQ ID NO: 2439 - RNA, 19 nt, artificial
  Oligomer
ggcaagugggugaaagaug

SEQ ID NO: 2440 - RNA, 19 nt, artificial
  Oligomer
gauggaggaaagugauauc

SEQ ID NO: 2441 - RNA, 19 nt, artificial
  Oligomer
ggcacagaacuuaaggaug

SEQ ID NO: 2442 - RNA, 19 nt, artificial
  Oligomer
agaagcgcuaucacgaaga

SEQ ID NO: 2443 - RNA, 19 nt, artificial
  Oligomer
gacauaagugaccugcuuu

SEQ ID NO: 2444 - RNA, 19 nt, artificial
  Oligomer
cagagauccaccugacugu

SEQ ID NO: 2445 - RNA, 19 nt, artificial
  Oligomer
caaauccagauaagugaca

SEQ ID NO: 2446 - RNA, 19 nt, artificial
  Oligomer
guucaccaugaggcucaaa

SEQ ID NO: 2447 - RNA, 19 nt, artificial
  Oligomer
cucuacaccuccaauguga

SEQ ID NO: 2448 - RNA, 19 nt, artificial
  Oligomer
aaagagcucaacaacaaau

SEQ ID NO: 2449 - RNA, 19 nt, artificial
  Oligomer
guacaugcagaaugaauac

SEQ ID NO: 2450 - RNA, 19 nt, artificial
  Oligomer
agaucaacauugcugugcu

SEQ ID NO: 2451 - RNA, 19 nt, artificial
  Oligomer
ugguacaugggcacagaga

SEQ ID NO: 2452 - RNA, 19 nt, artificial
  Oligomer
ugcccgggaaauguuugaa

SEQ ID NO: 2453 - RNA, 19 nt, artificial
  Oligomer
cgggagaugagcucaucuu

SEQ ID NO: 2454 - RNA, 19 nt, artificial
  Oligomer
cuccuucaaagaggcaaaa

SEQ ID NO: 2455 - RNA, 19 nt, artificial
  Oligomer
cuugcagguccaaaucuug

SEQ ID NO: 2456 - RNA, 19 nt, artificial
  Oligomer
uuuuaacuugcagguccaa

SEQ ID NO: 2457 - RNA, 19 nt, artificial
  Oligomer
aagggauuuuaacuugcag

SEQ ID NO: 2458 - RNA, 19 nt, artificial
  Oligomer
cgggaugacuuuccaagac

SEQ ID NO: 2459 - RNA, 19 nt, artificial
  Oligomer
cauuccugcuuuaaaaucu

SEQ ID NO: 2460 - RNA, 19 nt, artificial
  Oligomer
ucuccagaaucucugguca

SEQ ID NO: 2461 - RNA, 19 nt, artificial
  Oligomer
uuuguaaagccauagagau

SEQ ID NO: 2462 - RNA, 19 nt, artificial
  Oligomer
gaacuuaaggauggagcca

SEQ ID NO: 2463 - RNA, 19 nt, artificial
  Oligomer
cuaucacgaagauaucuuu

SEQ ID NO: 2464 - RNA, 19 nt, artificial
  Oligomer
caagagccagaagcgcuau

SEQ ID NO: 2465 - RNA, 19 nt, artificial
  Oligomer
aauugaaugaggagcaggu

SEQ ID NO: 2466 - RNA, 19 nt, artificial
  Oligomer
caagcccaaggucuauguu

SEQ ID NO: 2467 - RNA, 19 nt, artificial
  Oligomer
gaguacagcaaguggaagu

SEQ ID NO: 2468 - RNA, 19 nt, artificial
  Oligomer
uccagauaagugacauaag

SEQ ID NO: 2469 - RNA, 19 nt, artificial
  Oligomer
uguugguggugaccaguac

SEQ ID NO: 2470 - RNA, 19 nt, artificial
  Oligomer
cauggauaaguacaggcug

SEQ ID NO: 2471 - RNA, 19 nt, artificial
  Oligomer
acagagacaggaaaaucag

SEQ ID NO: 2472 - RNA, 19 nt, artificial
  Oligomer
augcugaugcgcaagacaa

SEQ ID NO: 2473 - RNA, 19 nt, artificial
  Oligomer
ccaagagaagagagauucc

SEQ ID NO: 2474 - RNA, 19 nt, artificial
  Oligomer
cagacuggauuuggcuggu

SEQ ID NO: 2475 - RNA, 19 nt, artificial
  Oligomer
cugucguugagaucaacau

SEQ ID NO: 2476 - RNA, 19 nt, artificial
  Oligomer
ucgggaacuggagcuaaag

SEQ ID NO: 2477 - RNA, 19 nt, artificial
  Oligomer
ggaaauguuugaacacauc

SEQ ID NO: 2478 - RNA, 19 nt, artificial
  Oligomer
caaccugcaggucuucgau

SEQ ID NO: 2479 - RNA, 19 nt, artificial
  Oligomer
gaaacaacaggaaccuacc

SEQ ID NO: 2480 - RNA, 19 nt, artificial
  Oligomer
ucuaccucaagcuaucgaa

SEQ ID NO: 2481 - RNA, 19 nt, artificial
  Oligomer
gcuucuaccucaagcuauc

SEQ ID NO: 2482 - RNA, 19 nt, artificial
  Oligomer
aggccaaagggauuuuaac

SEQ ID NO: 2483 - RNA, 19 nt, artificial
  Oligomer
ccuucaguaucacaaccuc

SEQ ID NO: 2484 - RNA, 19 nt, artificial
  Oligomer
caguccagugacacaggau

SEQ ID NO: 2485 - RNA, 19 nt, artificial
  Oligomer
aggucgaggacuauuucuu

SEQ ID NO: 2486 - RNA, 19 nt, artificial
  Oligomer
uucugaagcccagguucua

SEQ ID NO: 2487 - RNA, 19 nt, artificial
  Oligomer
gcaugcaugccaagaacgu

SEQ ID NO: 2488 - RNA, 19 nt, artificial
  Oligomer
caagcucuacaccuccaau

SEQ ID NO: 2489 - RNA, 19 nt, artificial
  Oligomer
gugcaaaccuucaaggcag

SEQ ID NO: 2490 - RNA, 19 nt, artificial
  Oligomer
ugaagaacaucugagcuca

SEQ ID NO: 2491 - RNA, 19 nt, artificial
  Oligomer
ccagaagcagaaugugacc

SEQ ID NO: 2492 - RNA, 19 nt, artificial
  Oligomer
ccauaguuuccagaagcag

SEQ ID NO: 2493 - RNA, 19 nt, artificial
  Oligomer
caacguggaauucacucag

SEQ ID NO: 2494 - RNA, 19 nt, artificial
  Oligomer
ucaucuucgccaccaagca

SEQ ID NO: 2495 - RNA, 19 nt, artificial
  Oligomer
ggccaaagggauuuuaacu

SEQ ID NO: 2496 - RNA, 19 nt, artificial
  Oligomer
augugaggaucaaaaacug

SEQ ID NO: 2497 - RNA, 19 nt, artificial
  Oligomer
aagaccaaauuccaccagu

SEQ ID NO: 2498 - RNA, 19 nt, artificial
  Oligomer
auuucuguucaagaccaaa

SEQ ID NO: 2499 - RNA, 19 nt, artificial
  Oligomer
uugggucuucccuguauga

SEQ ID NO: 2500 - RNA, 19 nt, artificial
  Oligomer
cugagugcaccacuucaag

SEQ ID NO: 2501 - RNA, 19 nt, artificial
  Oligomer
agucuuauuuccucaacgu

SEQ ID NO: 2502 - RNA, 19 nt, artificial
  Oligomer
ucugcauuaucugagguca

SEQ ID NO: 2503 - RNA, 19 nt, artificial
  Oligomer
acuuaaggauggagccagc

SEQ ID NO: 2504 - RNA, 19 nt, artificial
  Oligomer
guauuuccuuacgaggcga

SEQ ID NO: 2505 - RNA, 20 nt, artificial
  Oligomer
cagaagcgcuaucacgaagc

SEQ ID NO: 2506 - RNA, 19 nt, artificial
  Oligomer
uuuguuaccgcuuccaccc

SEQ ID NO: 2507 - RNA, 19 nt, artificial
  Oligomer
uaagauuuugucuccaagg

SEQ ID NO: 2508 - RNA, 19 nt, artificial
  Oligomer
uuuuaaagcaggaaugagg

SEQ ID NO: 2509 - RNA, 19 nt, artificial
  Oligomer
uuaagauuuugucuccaag

SEQ ID NO: 2510 - RNA, 19 nt, artificial
  Oligomer
ugcauacugguggaauuug

SEQ ID NO: 2511 - RNA, 19 nt, artificial
  Oligomer
guuuuuuaaauacagaggc

SEQ ID NO: 2512 - RNA, 19 nt, artificial
  Oligomer
uccuguuguuucuaucucc

SEQ ID NO: 2513 - RNA, 19 nt, artificial
  Oligomer
uuuugauccucacaugccg

SEQ ID NO: 2514 - RNA, 19 nt, artificial
  Oligomer
uugaccaagacuuucaaug

SEQ ID NO: 2515 - RNA, 19 nt, artificial
  Oligomer
uuuuugauccucacaugcc

SEQ ID NO: 2516 - RNA, 19 nt, artificial
  Oligomer
uuccacuugcuguacucug

SEQ ID NO: 2517 - RNA, 19 nt, artificial
  Oligomer
uuguugaugucuuuuuccc

SEQ ID NO: 2518 - RNA, 19 nt, artificial
  Oligomer
ucacuuuccuccaucuccc

SEQ ID NO: 2519 - RNA, 19 nt, artificial
  Oligomer
aucacuuuccuccaucucc

SEQ ID NO: 2520 - RNA, 19 nt, artificial
  Oligomer
uguuguuucuaucuccuuu

SEQ ID NO: 2521 - RNA, 19 nt, artificial
  Oligomer
uuuaaagcaggaaugaggc

SEQ ID NO: 2522 - RNA, 19 nt, artificial
  Oligomer
uugcauacugguggaauuu

SEQ ID NO: 2523 - RNA, 19 nt, artificial
  Oligomer
uuugggauguuccauggcc

SEQ ID NO: 2524 - RNA, 19 nt, artificial
  Oligomer
uugggagucauaauggacc

SEQ ID NO: 2525 - RNA, 19 nt, artificial
  Oligomer
ucuaucuccuuuguuaccg

SEQ ID NO: 2526 - RNA, 19 nt, artificial
  Oligomer
uuuucgacucgcuacaaag

SEQ ID NO: 2527 - RNA, 19 nt, artificial
  Oligomer
uugaacagaaauuuccaag

SEQ ID NO: 2528 - RNA, 19 nt, artificial
  Oligomer
uucgugauagcgcuucugg

SEQ ID NO: 2529 - RNA, 19 nt, artificial
  Oligomer
uugcgcaucagcauacagg

SEQ ID NO: 2530 - RNA, 19 nt, artificial
  Oligomer
uauggcuuuacaaagcagg

SEQ ID NO: 2531 - RNA, 19 nt, artificial
  Oligomer
uuugcugagguccaaaggc

SEQ ID NO: 2532 - RNA, 19 nt, artificial
  Oligomer
uuugccucggacaucaaac

SEQ ID NO: 2533 - RNA, 19 nt, artificial
  Oligomer
uuucucuccauugccaggg

SEQ ID NO: 2534 - RNA, 19 nt, artificial
  Oligomer
gcauacugguggaauuugg

SEQ ID NO: 2535 - RNA, 19 nt, artificial
  Oligomer
uaaauaacuguacacaagg

SEQ ID NO: 2536 - RNA, 19 nt, artificial
  Oligomer
uauuuuugccucuuugaag

SEQ ID NO: 2537 - RNA, 19 nt, artificial
  Oligomer
ucuuucagcaugaagagcg

SEQ ID NO: 2538 - RNA, 19 nt, artificial
  Oligomer
ucuuucacccacuugccag

SEQ ID NO: 2539 - RNA, 19 nt, artificial
  Oligomer
auggugaacacguucuugg

SEQ ID NO: 2540 - RNA, 19 nt, artificial
  Oligomer
ucaguuucucuccauugcc

SEQ ID NO: 2541 - RNA, 19 nt, artificial
  Oligomer
ucugauuuuccugucucug

SEQ ID NO: 2542 - RNA, 19 nt, artificial
  Oligomer
ugaaggagccguaauauug

SEQ ID NO: 2543 - RNA, 19 nt, artificial
  Oligomer
uugagguagaagcucaucu

SEQ ID NO: 2544 - RNA, 19 nt, artificial
  Oligomer
ucuuggaaagucaucccgc

SEQ ID NO: 2545 - RNA, 19 nt, artificial
  Oligomer
uuggaaagucaucccgcug

SEQ ID NO: 2546 - RNA, 19 nt, artificial
  Oligomer
uuuuccaggccucuaccug

SEQ ID NO: 2547 - RNA, 19 nt, artificial
  Oligomer
uugaucucaacgacagccu

SEQ ID NO: 2548 - RNA, 19 nt, artificial
  Oligomer
cuuuguuaccgcuuccacc

SEQ ID NO: 2549 - RNA, 19 nt, artificial
  Oligomer
uuuacaaagcaggucacuu

SEQ ID NO: 2550 - RNA, 19 nt, artificial
  Oligomer
uuauccaugcagacaaccu

SEQ ID NO: 2551 - RNA, 19 nt, artificial
  Oligomer
ugugccuugagaacuucgg

SEQ ID NO: 2552 - RNA, 19 nt, artificial
  Oligomer
uuuagcuccaguucccgaa

SEQ ID NO: 2553 - RNA, 19 nt, artificial
  Oligomer
uccaguucccgaaaccacu

SEQ ID NO: 2554 - RNA, 19 nt, artificial
  Oligomer
uaggaggucaaguaaaggg

SEQ ID NO: 2555 - RNA, 19 nt, artificial
  Oligomer
uccucauucaauuucagcu

SEQ ID NO: 2556 - RNA, 19 nt, artificial
  Oligomer
uucuuggcaugcaugcugc

SEQ ID NO: 2557 - RNA, 19 nt, artificial
  Oligomer
ucuccauugccaaacguac

SEQ ID NO: 2558 - RNA, 19 nt, artificial
  Oligomer
uguucaaacauuucccggg

SEQ ID NO: 2559 - RNA, 19 nt, artificial
  Oligomer
auugcauacugguggaauu

SEQ ID NO: 2560 - RNA, 19 nt, artificial
  Oligomer
uuaggaggucaaguaaagg

SEQ ID NO: 2561 - RNA, 19 nt, artificial
  Oligomer
uacagcaccaaagauaucu

SEQ ID NO: 2562 - RNA, 19 nt, artificial
  Oligomer
uucauucugcauguacuuc

SEQ ID NO: 2563 - RNA, 19 nt, artificial
  Oligomer
uguugguggaguaacgcac

SEQ ID NO: 2564 - RNA, 19 nt, artificial
  Oligomer
uucuaucuccuuuguuacc

SEQ ID NO: 2565 - RNA, 19 nt, artificial
  Oligomer
uacagaggcauaaauaacu

SEQ ID NO: 2566 - RNA, 19 nt, artificial
  Oligomer
uuaaauacacaguggugcg

SEQ ID NO: 2567 - RNA, 19 nt, artificial
  Oligomer
ucucuauggcuuuacaaag

SEQ ID NO: 2568 - RNA, 19 nt, artificial
  Oligomer
aaacguacuggucaccacc

SEQ ID NO: 2569 - RNA, 19 nt, artificial
  Oligomer
uauucauucugcauguacu

SEQ ID NO: 2570 - RNA, 19 nt, artificial
  Oligomer
ucugcuucuggaaacuaug

SEQ ID NO: 2571 - RNA, 19 nt, artificial
  Oligomer
uuucgaagagcucaggguc

SEQ ID NO: 2572 - RNA, 19 nt, artificial
  Oligomer
uuugauccucacaugccgu

SEQ ID NO: 2573 - RNA, 19 nt, artificial
  Oligomer
auccaugcagacaaccuug

SEQ ID NO: 2574 - RNA, 19 nt, artificial
  Oligomer
ucaguuuucgacucgcuac

SEQ ID NO: 2575 - RNA, 19 nt, artificial
  Oligomer
uuuccaggcccauucuccu

SEQ ID NO: 2576 - RNA, 19 nt, artificial
  Oligomer
uguuccucuauuuuugccu

SEQ ID NO: 2577 - RNA, 19 nt, artificial
  Oligomer
uugagccucauggugaaca

SEQ ID NO: 2578 - RNA, 19 nt, artificial
  Oligomer
uacuucaugaaggauucug

SEQ ID NO: 2579 - RNA, 19 nt, artificial
  Oligomer
auguguucaaacauuuccc

SEQ ID NO: 2580 - RNA, 19 nt, artificial
  Oligomer
uuugccucuuugaaggagc

SEQ ID NO: 2581 - RNA, 19 nt, artificial
  Oligomer
uuugucuccaagggaccag

SEQ ID NO: 2582 - RNA, 19 nt, artificial
  Oligomer
uucucuugggucuccgcuu

SEQ ID NO: 2583 - RNA, 19 nt, artificial
  Oligomer
uuaaaaucccuuuggccuu

SEQ ID NO: 2584 - RNA, 19 nt, artificial
  Oligomer
uggaauuuggucuugaaca

SEQ ID NO: 2585 - RNA, 19 nt, artificial
  Oligomer
uggcauuuaagauuuuguc

SEQ ID NO: 2586 - RNA, 19 nt, artificial
  Oligomer
aucaaugucaugagcaaag

SEQ ID NO: 2587 - RNA, 19 nt, artificial
  Oligomer
uccauugccaaacguacug

SEQ ID NO: 2588 - RNA, 19 nt, artificial
  Oligomer
uugccaaacguacugguca

SEQ ID NO: 2589 - RNA, 19 nt, artificial
  Oligomer
ucuccuuuguuaccgcuuc

SEQ ID NO: 2590 - RNA, 19 nt, artificial
  Oligomer
cucagcagcaaguuccauc

SEQ ID NO: 2591 - RNA, 19 nt, artificial
  Oligomer
uugagcugaaagaaauagu

SEQ ID NO: 2592 - RNA, 19 nt, artificial
  Oligomer
acuugcuguacucugaggg

SEQ ID NO: 2593 - RNA, 19 nt, artificial
  Oligomer
ugucggacuuuguagauuc

SEQ ID NO: 2594 - RNA, 19 nt, artificial
  Oligomer
acguaguucagcaucuccu

SEQ ID NO: 2595 - RNA, 19 nt, artificial
  Oligomer
uucaugaaggauucugcag

SEQ ID NO: 2596 - RNA, 19 nt, artificial
  Oligomer
uguuguugaugucuuuuuc

SEQ ID NO: 2597 - RNA, 19 nt, artificial
  Oligomer
uucagcaugaagagcgauu

SEQ ID NO: 2598 - RNA, 19 nt, artificial
  Oligomer
uuucuucaguuucucucca

SEQ ID NO: 2599 - RNA, 19 nt, artificial
  Oligomer
uuuccaggccucuaccuga

SEQ ID NO: 2600 - RNA, 19 nt, artificial
  Oligomer
auauugguugacaaauucg

SEQ ID NO: 2601 - RNA, 19 nt, artificial
  Oligomer
ugacaaauucgauagcuug

SEQ ID NO: 2602 - RNA, 19 nt, artificial
  Oligomer
uccaucuuucacccacuug

SEQ ID NO: 2603 - RNA, 19 nt, artificial
  Oligomer
uuaaguucugugccggcag

SEQ ID NO: 2604 - RNA, 19 nt, artificial
  Oligomer
ugauggaguagaaccuggg

SEQ ID NO: 2605 - RNA, 19 nt, artificial
  Oligomer
ucugcagauguguucaaac

SEQ ID NO: 2606 - RNA, 19 nt, artificial
  Oligomer
uucuggagacuucuuuccc

SEQ ID NO: 2607 - RNA, 19 nt, artificial
  Oligomer
uuggucuugaacagaaauu

SEQ ID NO: 2608 - RNA, 19 nt, artificial
  Oligomer
ucacuuaugucacuuaucu

SEQ ID NO: 2609 - RNA, 19 nt, artificial
  Oligomer
ucuagcaccuccaggaaug

SEQ ID NO: 2610 - RNA, 19 nt, artificial
  Oligomer
uugccucggacaucaaacg

SEQ ID NO: 2611 - RNA, 19 nt, artificial
  Oligomer
uuuuccugucucugucgca

SEQ ID NO: 2612 - RNA, 19 nt, artificial
  Oligomer
uuuccugucucugucgcaa

SEQ ID NO: 2613 - RNA, 19 nt, artificial
  Oligomer
augauggucacauucugcu

SEQ ID NO: 2614 - RNA, 19 nt, artificial
  Oligomer
uucgggacugucuagaacu

SEQ ID NO: 2615 - RNA, 19 nt, artificial
  Oligomer
ucuggagacuucuuucccg

SEQ ID NO: 2616 - RNA, 19 nt, artificial
  Oligomer
ucauguaaauaucuccauc

SEQ ID NO: 2617 - RNA, 19 nt, artificial
  Oligomer
guaaauaucuccaucaagg

SEQ ID NO: 2618 - RNA, 19 nt, artificial
  Oligomer
ucagcagcaaguuccaucu

SEQ ID NO: 2619 - RNA, 19 nt, artificial
  Oligomer
uccauccuuaaguucugug

SEQ ID NO: 2620 - RNA, 19 nt, artificial
  Oligomer
ucucucaggcucuucugug

SEQ ID NO: 2621 - RNA, 19 nt, artificial
  Oligomer
uugucacugacccaguagc

SEQ ID NO: 2622 - RNA, 19 nt, artificial
  Oligomer
uggaugucggacuuuguag

SEQ ID NO: 2623 - RNA, 19 nt, artificial
  Oligomer
ucaaacgucucacaggcug

SEQ ID NO: 2624 - RNA, 19 nt, artificial
  Oligomer
auuuuccugucucugucgc

SEQ ID NO: 2625 - RNA, 19 nt, artificial
  Oligomer
ugcauguacuucaugaagg

SEQ ID NO: 2626 - RNA, 19 nt, artificial
  Oligomer
ucaagcagcauguuggcca

SEQ ID NO: 2627 - RNA, 19 nt, artificial
  Oligomer
uuucgacucgcuacaaagu

SEQ ID NO: 2628 - RNA, 19 nt, artificial
  Oligomer
uucgacucgcuacaaaguu

SEQ ID NO: 2629 - RNA, 19 nt, artificial
  Oligomer
ugaacagaaauuuccaagg

SEQ ID NO: 2630 - RNA, 19 nt, artificial
  Oligomer
uugaaguggugcacucagc

SEQ ID NO: 2631 - RNA, 19 nt, artificial
  Oligomer
cuggcauuuaagauuuugu

SEQ ID NO: 2632 - RNA, 19 nt, artificial
  Oligomer
uccuuaaguucugugccgg

SEQ ID NO: 2633 - RNA, 19 nt, artificial
  Oligomer
uucugugccggcagcuuua

SEQ ID NO: 2634 - RNA, 19 nt, artificial
  Oligomer
uccuucuucgccucguaag

SEQ ID NO: 2635 - RNA, 19 nt, artificial
  Oligomer
uccugaacauagaccuugg

SEQ ID NO: 2636 - RNA, 19 nt, artificial
  Oligomer
uacuuauccaugcagacaa

SEQ ID NO: 2637 - RNA, 19 nt, artificial
  Oligomer
uugaaggcacagcugaaua

SEQ ID NO: 2638 - RNA, 19 nt, artificial
  Oligomer
uucugcauguacuucauga

SEQ ID NO: 2639 - RNA, 19 nt, artificial
  Oligomer
auuuuugccucuuugaagg

SEQ ID NO: 2640 - RNA, 19 nt, artificial
  Oligomer
auggugaagugugucuugg

SEQ ID NO: 2641 - RNA, 19 nt, artificial
  Oligomer
cuucaguuucucuccauug

SEQ ID NO: 2642 - RNA, 19 nt, artificial
  Oligomer
uccaugcagacaaccuugg

SEQ ID NO: 2643 - RNA, 19 nt, artificial
  Oligomer
auugucuugcgcaucagca

SEQ ID NO: 2644 - RNA, 19 nt, artificial
  Oligomer
augagcugagcauuccaca

SEQ ID NO: 2645 - RNA, 19 nt, artificial
  Oligomer
ucuauuuuugccucuuuga

SEQ ID NO: 2646 - RNA, 19 nt, artificial
  Oligomer
ugguggaauuuggucuuga

SEQ ID NO: 2647 - RNA, 19 nt, artificial
  Oligomer
ucuugaacagaaauuucca

SEQ ID NO: 2648 - RNA, 19 nt, artificial
  Oligomer
uuccaaggacaggccaucu

SEQ ID NO: 2649 - RNA, 19 nt, artificial
  Oligomer
uuaucuggauuugagcuca

SEQ ID NO: 2650 - RNA, 19 nt, artificial
  Oligomer
uuguugagcucuuucagca

SEQ ID NO: 2651 - RNA, 19 nt, artificial
  Oligomer
auguacuucaugaaggauu

SEQ ID NO: 2652 - RNA, 19 nt, artificial
  Oligomer
acuuuagcuccaguucccg

SEQ ID NO: 2653 - RNA, 19 nt, artificial
  Oligomer
uuccucuauuuuugccucu

SEQ ID NO: 2654 - RNA, 19 nt, artificial
  Oligomer
uuugggagucauaauggac

SEQ ID NO: 2655 - RNA, 19 nt, artificial
  Oligomer
cauacugguggaauuuggu

SEQ ID NO: 2656 - RNA, 19 nt, artificial
  Oligomer
ccaucuuucacccacuugc

SEQ ID NO: 2657 - RNA, 19 nt, artificial
  Oligomer
gcauuuaagauuuugucuc

SEQ ID NO: 2658 - RNA, 19 nt, artificial
  Oligomer
aucuucgugauagcgcuuc

SEQ ID NO: 2659 - RNA, 19 nt, artificial
  Oligomer
aucuccagcaucuccuccu

SEQ ID NO: 2660 - RNA, 19 nt, artificial
  Oligomer
auggaguagaaccugggcu

SEQ ID NO: 2661 - RNA, 19 nt, artificial
  Oligomer
augucaugagcaaaggcgc

SEQ ID NO: 2662 - RNA, 19 nt, artificial
  Oligomer
uugagcucuuucagcauga

SEQ ID NO: 2663 - RNA, 19 nt, artificial
  Oligomer
acuuucaauggaaucucuc

SEQ ID NO: 2664 - RNA, 19 nt, artificial
  Oligomer
uugggauguuccauggcca

SEQ ID NO: 2665 - RNA, 19 nt, artificial
  Oligomer
uuguuaccgcuuccacccu

SEQ ID NO: 2666 - RNA, 19 nt, artificial
  Oligomer
uuugaaggagccguaauau

SEQ ID NO: 2667 - RNA, 19 nt, artificial
  Oligomer
uagaagcucaucuggaggg

SEQ ID NO: 2668 - RNA, 19 nt, artificial
  Oligomer
auacugaaggucauccugu

SEQ ID NO: 2669 - RNA, 19 nt, artificial
  Oligomer
uguaaauaucuccaucaag

SEQ ID NO: 2670 - RNA, 19 nt, artificial
  Oligomer
aaucauacagggaagaccc

SEQ ID NO: 2671 - RNA, 19 nt, artificial
  Oligomer
gcaaguuccaucuuucacc

SEQ ID NO: 2672 - RNA, 19 nt, artificial
  Oligomer
aaugaggcugaguucucug

SEQ ID NO: 2673 - RNA, 19 nt, artificial
  Oligomer
uucaggcuguugagccaug

SEQ ID NO: 2674 - RNA, 19 nt, artificial
  Oligomer
uuggagguguagagcuugg

SEQ ID NO: 2675 - RNA, 19 nt, artificial
  Oligomer
uggugguccaugaugguca

SEQ ID NO: 2676 - RNA, 19 nt, artificial
  Oligomer
ucaggugggauuucgaaga

SEQ ID NO: 2677 - RNA, 19 nt, artificial
  Oligomer
uugauccucacaugccgug

SEQ ID NO: 2678 - RNA, 19 nt, artificial
  Oligomer
ucauucaauuucagcuugg

SEQ ID NO: 2679 - RNA, 19 nt, artificial
  Oligomer
auucaauuucagcuuggca

SEQ ID NO: 2680 - RNA, 19 nt, artificial
  Oligomer
ccaaacaccaaggucaugc

SEQ ID NO: 2681 - RNA, 19 nt, artificial
  Oligomer
uuggcaugcaugcugcuga

SEQ ID NO: 2682 - RNA, 19 nt, artificial
  Oligomer
uaaggacagucaaaccagg

SEQ ID NO: 2683 - RNA, 19 nt, artificial
  Oligomer
ugaccaagacuuucaaugg

SEQ ID NO: 2684 - RNA, 19 nt, artificial
  Oligomer
uucucguccugccagacau

SEQ ID NO: 2685 - RNA, 19 nt, artificial
  Oligomer
ugucuagaacugcccaguc

SEQ ID NO: 2686 - RNA, 19 nt, artificial
  Oligomer
auguuccucuauuuuugcc

SEQ ID NO: 2687 - RNA, 19 nt, artificial
  Oligomer
uccucuggucaaacuuuug

SEQ ID NO: 2688 - RNA, 19 nt, artificial
  Oligomer
uucugcugcuugcugaggu

SEQ ID NO: 2689 - RNA, 19 nt, artificial
  Oligomer
guuguugaugucuuuuucc

SEQ ID NO: 2690 - RNA, 19 nt, artificial
  Oligomer
auccuuaaguucugugccg

SEQ ID NO: 2691 - RNA, 19 nt, artificial
  Oligomer
ugagcugaaagaaauaguc

SEQ ID NO: 2692 - RNA, 19 nt, artificial
  Oligomer
cugaaagaaauaguccucg

SEQ ID NO: 2693 - RNA, 19 nt, artificial
  Oligomer
auguccaggaaguagguga

SEQ ID NO: 2694 - RNA, 19 nt, artificial
  Oligomer
ucagauguucuucacugug

SEQ ID NO: 2695 - RNA, 19 nt, artificial
  Oligomer
ucugucgcaaagaggaugg

SEQ ID NO: 2696 - RNA, 19 nt, artificial
  Oligomer
agucaaaccaggaagagac

SEQ ID NO: 2697 - RNA, 19 nt, artificial
  Oligomer
uugguggcgaagaugagcu

SEQ ID NO: 2698 - RNA, 19 nt, artificial
  Oligomer
ccuguuguuucuaucuccu

SEQ ID NO: 2699 - RNA, 19 nt, artificial
  Oligomer
agauguuccucuauuuuug

SEQ ID NO: 2700 - RNA, 19 nt, artificial
  Oligomer
cucuauuuuugccucuuug

SEQ ID NO: 2701 - RNA, 19 nt, artificial
  Oligomer
uugaaggagccguaauauu

SEQ ID NO: 2702 - RNA, 19 nt, artificial
  Oligomer
uugacaaauucgauagcuu

SEQ ID NO: 2703 - RNA, 19 nt, artificial
  Oligomer
cuuuugggagucauaaugg

SEQ ID NO: 2704 - RNA, 19 nt, artificial
  Oligomer
guuuuugauccucacaugc

SEQ ID NO: 2705 - RNA, 19 nt, artificial
  Oligomer
uugaccagagauucuggag

SEQ ID NO: 2706 - RNA, 19 nt, artificial
  Oligomer
acuucuuucccgucuccac

SEQ ID NO: 2707 - RNA, 19 nt, artificial
  Oligomer
cauucauugcauacuggug

SEQ ID NO: 2708 - RNA, 19 nt, artificial
  Oligomer
uuuugucuccaagggacca

SEQ ID NO: 2709 - RNA, 19 nt, artificial
  Oligomer
agcaccaaagauaucuucg

SEQ ID NO: 2710 - RNA, 19 nt, artificial
  Oligomer
aguagcugccacucucauc

SEQ ID NO: 2711 - RNA, 19 nt, artificial
  Oligomer
acucgcuccaggauaccuu

SEQ ID NO: 2712 - RNA, 19 nt, artificial
  Oligomer
uaugucacuuaucuggauu

SEQ ID NO: 2713 - RNA, 19 nt, artificial
  Oligomer
ucuucaguuucucuccauu

SEQ ID NO: 2714 - RNA, 19 nt, artificial
  Oligomer
ugauuuuccugucucuguc

SEQ ID NO: 2715 - RNA, 19 nt, artificial
  Oligomer
ucagcauacaggcaaagag

SEQ ID NO: 2716 - RNA, 19 nt, artificial
  Oligomer
acagcuuugaccaagacuu

SEQ ID NO: 2717 - RNA, 19 nt, artificial
  Oligomer
aauggaaucucucuucucu

SEQ ID NO: 2718 - RNA, 19 nt, artificial
  Oligomer
auggaaucucucuucucuu

SEQ ID NO: 2719 - RNA, 19 nt, artificial
  Oligomer
aucuccuggugaaacacgg

SEQ ID NO: 2720 - RNA, 19 nt, artificial
  Oligomer
auguaccagccauugaagg

SEQ ID NO: 2721 - RNA, 19 nt, artificial
  Oligomer
ugagcugagcauuccacac

SEQ ID NO: 2722 - RNA, 19 nt, artificial
  Oligomer
uacugaaggucauccugug

SEQ ID NO: 2723 - RNA, 19 nt, artificial
  Oligomer
ugaaugugcuguuugccuc

SEQ ID NO: 2724 - RNA, 19 nt, artificial
  Oligomer
augaagagcgauuucuuca

SEQ ID NO: 2725 - RNA, 19 nt, artificial
  Oligomer
ucaauggaaucucucuucu

SEQ ID NO: 2726 - RNA, 19 nt, artificial
  Oligomer
ucucucuucucuugggucu

SEQ ID NO: 2727 - RNA, 19 nt, artificial
  Oligomer
ugccagacauggguuuucc

SEQ ID NO: 2728 - RNA, 19 nt, artificial
  Oligomer
aucucugugcccauguacc

SEQ ID NO: 2729 - RNA, 19 nt, artificial
  Oligomer
auuguugguggaguaacgc

SEQ ID NO: 2730 - RNA, 19 nt, artificial
  Oligomer
aucuccuuuguuaccgcuu

SEQ ID NO: 2731 - RNA, 19 nt, artificial
  Oligomer
cugaaggucauccuguguc

SEQ ID NO: 2732 - RNA, 19 nt, artificial
  Oligomer
cauugcauacugguggaau

SEQ ID NO: 2733 - RNA, 19 nt, artificial
  Oligomer
acuggguguuaguuuuuua

SEQ ID NO: 2734 - RNA, 19 nt, artificial
  Oligomer
cauuuaagauuuugucucc

SEQ ID NO: 2735 - RNA, 19 nt, artificial
  Oligomer
ugucucugucgcaaagagg

SEQ ID NO: 2736 - RNA, 19 nt, artificial
  Oligomer
aaagagcacagcuuugacc

SEQ ID NO: 2737 - RNA, 19 nt, artificial
  Oligomer
cugugccuugagaacuucg

SEQ ID NO: 2738 - RNA, 19 nt, artificial
  Oligomer
accucaagcagcauguugg

SEQ ID NO: 2739 - RNA, 19 nt, artificial
  Oligomer
uguguucaaacauuucccg

SEQ ID NO: 2740 - RNA, 19 nt, artificial
  Oligomer
ugcaaguuaaaaucccuuu

SEQ ID NO: 2741 - RNA, 19 nt, artificial
  Oligomer
uucuuucccgucuccacga

SEQ ID NO: 2742 - RNA, 19 nt, artificial
  Oligomer
cuggguguuaguuuuuuaa

SEQ ID NO: 2743 - RNA, 19 nt, artificial
  Oligomer
aaggcaguuaaauacacag

SEQ ID NO: 2744 - RNA, 19 nt, artificial
  Oligomer
uacacaguggugcgauagc

SEQ ID NO: 2745 - RNA, 19 nt, artificial
  Oligomer
aguuccaucuuucacccac

SEQ ID NO: 2746 - RNA, 19 nt, artificial
  Oligomer
ucaaguaaagggcuugaug

SEQ ID NO: 2747 - RNA, 19 nt, artificial
  Oligomer
uguugagccaugugcugca

SEQ ID NO: 2748 - RNA, 19 nt, artificial
  Oligomer
ucggacaucaaacgucuca

SEQ ID NO: 2749 - RNA, 19 nt, artificial
  Oligomer
uggauuugagcucagaugu

SEQ ID NO: 2750 - RNA, 19 nt, artificial
  Oligomer
uguacuucaugaaggauuc

SEQ ID NO: 2751 - RNA, 19 nt, artificial
  Oligomer
ugguccaugauggucacau

SEQ ID NO: 2752 - RNA, 19 nt, artificial
  Oligomer
uccuccaggauguuguagc

SEQ ID NO: 2753 - RNA, 19 nt, artificial
  Oligomer
uggaguaacgcacgugucu

SEQ ID NO: 2754 - RNA, 19 nt, artificial
  Oligomer
uaucuccuuuguuaccgcu

SEQ ID NO: 2755 - RNA, 19 nt, artificial
  Oligomer
ugguugacaaauucgauag

SEQ ID NO: 2756 - RNA, 19 nt, artificial
  Oligomer
uccagcuugaccagagauu

SEQ ID NO: 2757 - RNA, 19 nt, artificial
  Oligomer
aucaaggaaucauacaggg

SEQ ID NO: 2758 - RNA, 19 nt, artificial
  Oligomer
auacagaggcauaaauaac

SEQ ID NO: 2759 - RNA, 19 nt, artificial
  Oligomer
uacacaaggcaguuaaaua

SEQ ID NO: 2760 - RNA, 19 nt, artificial
  Oligomer
uuccaucuuucacccacuu

SEQ ID NO: 2761 - RNA, 19 nt, artificial
  Oligomer
auuuugucuccaagggacc

SEQ ID NO: 2762 - RNA, 19 nt, artificial
  Oligomer
ucagauaaugcagagcugg

SEQ ID NO: 2763 - RNA, 19 nt, artificial
  Oligomer
aacuccucuagcaccucca

SEQ ID NO: 2764 - RNA, 19 nt, artificial
  Oligomer
ucugucucucaggcucuuc

SEQ ID NO: 2765 - RNA, 19 nt, artificial
  Oligomer
ucagccuguacuuauccau

SEQ ID NO: 2766 - RNA, 19 nt, artificial
  Oligomer
acuucaugaaggauucugc

SEQ ID NO: 2767 - RNA, 19 nt, artificial
  Oligomer
ugaaggauucugcagccga

SEQ ID NO: 2768 - RNA, 19 nt, artificial
  Oligomer
uguuccauggccaccucaa

SEQ ID NO: 2769 - RNA, 19 nt, artificial
  Oligomer
ucaaacauuucccgggcag

SEQ ID NO: 2770 - RNA, 19 nt, artificial
  Oligomer
ucccuuuggccuuauggug

SEQ ID NO: 2771 - RNA, 19 nt, artificial
  Oligomer
gaaauuuccaaggacaggc

SEQ ID NO: 2772 - RNA, 19 nt, artificial
  Oligomer
aggaaauacagcaccaaag

SEQ ID NO: 2773 - RNA, 19 nt, artificial
  Oligomer
uccacuugcuguacucuga

SEQ ID NO: 2774 - RNA, 19 nt, artificial
  Oligomer
uucugccgagauuugagcc

SEQ ID NO: 2775 - RNA, 19 nt, artificial
  Oligomer
auuugagcucagauguucu

SEQ ID NO: 2776 - RNA, 19 nt, artificial
  Oligomer
uguuguugagcucuuucag

SEQ ID NO: 2777 - RNA, 19 nt, artificial
  Oligomer
uucuucaguuucucuccau

SEQ ID NO: 2778 - RNA, 19 nt, artificial
  Oligomer
aguuucucuccauugccag

SEQ ID NO: 2779 - RNA, 19 nt, artificial
  Oligomer
uuccugucucugucgcaaa

SEQ ID NO: 2780 - RNA, 19 nt, artificial
  Oligomer
auacaggcaaagagcacag

SEQ ID NO: 2781 - RNA, 19 nt, artificial
  Oligomer
aucucucuucucuuggguc

SEQ ID NO: 2782 - RNA, 19 nt, artificial
  Oligomer
auggguuuuccaggccucu

SEQ ID NO: 2783 - RNA, 19 nt, artificial
  Oligomer
agcaauguugaucucaacg

SEQ ID NO: 2784 - RNA, 19 nt, artificial
  Oligomer
uucccgaaaccacucguau

SEQ ID NO: 2785 - RNA, 19 nt, artificial
  Oligomer
ugagugaauuccacguugg

SEQ ID NO: 2786 - RNA, 19 nt, artificial
  Oligomer
uaacgcacgugucugcaga

SEQ ID NO: 2787 - RNA, 19 nt, artificial
  Oligomer
guuccuguuguuucuaucu

SEQ ID NO: 2788 - RNA, 19 nt, artificial
  Oligomer
uggccgagagauuuuaaag

SEQ ID NO: 2789 - RNA, 19 nt, artificial
  Oligomer
uggaccugcaaguuaaaau

SEQ ID NO: 2790 - RNA, 19 nt, artificial
  Oligomer
gugucuuggaaagucaucc

SEQ ID NO: 2791 - RNA, 19 nt, artificial
  Oligomer
ucuccaucaaggaaucaua

SEQ ID NO: 2792 - RNA, 19 nt, artificial
  Oligomer
uagcgcuucuggcucuuga

SEQ ID NO: 2793 - RNA, 19 nt, artificial
  Oligomer
ucgaccugcuccucauuca

SEQ ID NO: 2794 - RNA, 19 nt, artificial
  Oligomer
auuucagcuuggcagccac

SEQ ID NO: 2795 - RNA, 19 nt, artificial
  Oligomer
cugaacauagaccuugggc

SEQ ID NO: 2796 - RNA, 19 nt, artificial
  Oligomer
ugaggaugcaaggauggga

SEQ ID NO: 2797 - RNA, 19 nt, artificial
  Oligomer
ugaacuuccacuugcugua

SEQ ID NO: 2798 - RNA, 19 nt, artificial
  Oligomer
auccucacaggagaguucc

SEQ ID NO: 2799 - RNA, 19 nt, artificial
  Oligomer
uuguagauucugccgagau

SEQ ID NO: 2800 - RNA, 19 nt, artificial
  Oligomer
ucugaaugugcuguuugcc

SEQ ID NO: 2801 - RNA, 19 nt, artificial
  Oligomer
ugccuugaagguuugcacg

SEQ ID NO: 2802 - RNA, 19 nt, artificial
  Oligomer
uucugaucaaugucaugag

SEQ ID NO: 2803 - RNA, 19 nt, artificial
  Oligomer
uacuggucaccaccaacag

SEQ ID NO: 2804 - RNA, 19 nt, artificial
  Oligomer
agcgccucugauuuuccug

SEQ ID NO: 2805 - RNA, 19 nt, artificial
  Oligomer
auucauucugcauguacuu

SEQ ID NO: 2806 - RNA, 19 nt, artificial
  Oligomer
cucguauuugggauguucc

SEQ ID NO: 2807 - RNA, 19 nt, artificial
  Oligomer
uuguugguggaguaacgca

SEQ ID NO: 2808 - RNA, 19 nt, artificial
  Oligomer
cuguuguuucuaucuccuu

SEQ ID NO: 2809 - RNA, 19 nt, artificial
  Oligomer
ugagguagaagcucaucug

SEQ ID NO: 2810 - RNA, 19 nt, artificial
  Oligomer
acuuuugggagucauaaug

SEQ ID NO: 2811 - RNA, 19 nt, artificial
  Oligomer
ugagguugugauacugaag

SEQ ID NO: 2812 - RNA, 19 nt, artificial
  Oligomer
aauaucuccaucaaggaau

SEQ ID NO: 2813 - RNA, 19 nt, artificial
  Oligomer
auacacaguggugcgauag

SEQ ID NO: 2814 - RNA, 19 nt, artificial
  Oligomer
uccagggugcuacuuguua

SEQ ID NO: 2815 - RNA, 19 nt, artificial
  Oligomer
gauaucuucgugauagcgc

SEQ ID NO: 2816 - RNA, 19 nt, artificial
  Oligomer
ucaauuucagcuuggcagc

SEQ ID NO: 2817 - RNA, 19 nt, artificial
  Oligomer
guccugaacauagaccuug

SEQ ID NO: 2818 - RNA, 19 nt, artificial
  Oligomer
ucaaugucaugagcaaagg

SEQ ID NO: 2819 - RNA, 19 nt, artificial
  Oligomer
acuauggagcacagcaaug

SEQ ID NO: 2820 - RNA, 19 nt, artificial
  Oligomer
auuugggauguuccauggc

SEQ ID NO: 2821 - RNA, 19 nt, artificial
  Oligomer
auguuccauggccaccuca

SEQ ID NO: 2822 - RNA, 19 nt, artificial
  Oligomer
augagcucaucucccguca

SEQ ID NO: 2823 - RNA, 19 nt, artificial
  Oligomer
uguuucuaucuccuuuguu

SEQ ID NO: 2824 - RNA, 19 nt, artificial
  Oligomer
uuuugggagucauaaugga

SEQ ID NO: 2825 - RNA, 19 nt, artificial
  Oligomer
ugaagugugucuuggaaag

SEQ ID NO: 2826 - RNA, 19 nt, artificial
  Oligomer
aauaacuguacacaaggca

SEQ ID NO: 2827 - RNA, 19 nt, artificial
  Oligomer
agcaaguuccaucuuucac

SEQ ID NO: 2828 - RNA, 19 nt, artificial
  Oligomer
aggaggucaaguaaagggc

SEQ ID NO: 2829 - RNA, 19 nt, artificial
  Oligomer
ugaggaaauaagacuugag

SEQ ID NO: 2830 - RNA, 19 nt, artificial
  Oligomer
ugugaccucagauaaugca

SEQ ID NO: 2831 - RNA, 19 nt, artificial
  Oligomer
cuccucauucaauuucagc

SEQ ID NO: 2832 - RNA, 19 nt, artificial
  Oligomer
agucagguggaucucugug

SEQ ID NO: 2833 - RNA, 19 nt, artificial
  Oligomer
cugauggaguagaaccugg

SEQ ID NO: 2834 - RNA, 19 nt, artificial
  Oligomer
uggaguagaaccugggcuu

SEQ ID NO: 2835 - RNA, 19 nt, artificial
  Oligomer
gugauguccaggaaguagg

SEQ ID NO: 2836 - RNA, 19 nt, artificial
  Oligomer
ucggacuuuguagauucug

SEQ ID NO: 2837 - RNA, 19 nt, artificial
  Oligomer
uggugaacacguucuuggc

SEQ ID NO: 2838 - RNA, 19 nt, artificial
  Oligomer
cuuauccaugcagacaacc

SEQ ID NO: 2839 - RNA, 19 nt, artificial
  Oligomer
aggauggugacucugacuc

SEQ ID NO: 2840 - RNA, 19 nt, artificial
  Oligomer
auggucacauucugcuucu

SEQ ID NO: 2841 - RNA, 19 nt, artificial
  Oligomer
uucugcuucuggaaacuau

SEQ ID NO: 2842 - RNA, 19 nt, artificial
  Oligomer
uggagcacagcaauguuga

SEQ ID NO: 2843 - RNA, 19 nt, artificial
  Oligomer
aucucaacgacagccuggu

SEQ ID NO: 2844 - RNA, 19 nt, artificial
  Oligomer
uccaggauguuguagcgcu

SEQ ID NO: 2845 - RNA, 19 nt, artificial
  Oligomer
accacuuuagcuccaguuc

SEQ ID NO: 2846 - RNA, 19 nt, artificial
  Oligomer
uugccauuguugguggagu

SEQ ID NO: 2847 - RNA, 19 nt, artificial
  Oligomer
guguucaaacauuucccgg

SEQ ID NO: 2848 - RNA, 19 nt, artificial
  Oligomer
uuguuucuaucuccuuugu

SEQ ID NO: 2849 - RNA, 19 nt, artificial
  Oligomer
uucauugcauacuggugga

SEQ ID NO: 2850 - RNA, 19 nt, artificial
  Oligomer
aucuuucacccacuugcca

SEQ ID NO: 2851 - RNA, 19 nt, artificial
  Oligomer
uaaugcagagcuggcucca

SEQ ID NO: 2852 - RNA, 19 nt, artificial
  Oligomer
aauaguccucgaccugcuc

SEQ ID NO: 2853 - RNA, 19 nt, artificial
  Oligomer
auguccugaacauagaccu

SEQ ID NO: 2854 - RNA, 19 nt, artificial
  Oligomer
ugaacauagaccuugggcu

SEQ ID NO: 2855 - RNA, 19 nt, artificial
  Oligomer
uccugucucugucgcaaag

SEQ ID NO: 2856 - RNA, 19 nt, artificial
  Oligomer
ugucuugcgcaucagcaua

SEQ ID NO: 2857 - RNA, 19 nt, artificial
  Oligomer
uuugaccaagacuuucaau

SEQ ID NO: 2858 - RNA, 19 nt, artificial
  Oligomer
aagacuuucaauggaaucu

SEQ ID NO: 2859 - RNA, 19 nt, artificial
  Oligomer
uccaugauggucacauucu

SEQ ID NO: 2860 - RNA, 19 nt, artificial
  Oligomer
aauguugaucucaacgaca

SEQ ID NO: 2861 - RNA, 19 nt, artificial
  Oligomer
ugaucucaacgacagccug

SEQ ID NO: 2862 - RNA, 19 nt, artificial
  Oligomer
ccacuuuagcuccaguucc

SEQ ID NO: 2863 - RNA, 19 nt, artificial
  Oligomer
ugaauuccacguuggcagg

SEQ ID NO: 2864 - RNA, 19 nt, artificial
  Oligomer
gaagaugagcucaucuccc

SEQ ID NO: 2865 - RNA, 19 nt, artificial
  Oligomer
cuccuuuguuaccgcuucc

SEQ ID NO: 2866 - RNA, 19 nt, artificial
  Oligomer
accugcaaguuaaaauccc

SEQ ID NO: 2867 - RNA, 19 nt, artificial
  Oligomer
uuuggccuuauggugaagu

SEQ ID NO: 2868 - RNA, 19 nt, artificial
  Oligomer
aagugugucuuggaaaguc

SEQ ID NO: 2869 - RNA, 19 nt, artificial
  Oligomer
ugugucuuggaaagucauc

SEQ ID NO: 2870 - RNA, 19 nt, artificial
  Oligomer
auuuuaaagcaggaaugag

SEQ ID NO: 2871 - RNA, 19 nt, artificial
  Oligomer
uacagggaagacccaagug

SEQ ID NO: 2872 - RNA, 19 nt, artificial
  Oligomer
auaacuguacacaaggcag

SEQ ID NO: 2873 - RNA, 19 nt, artificial
  Oligomer
ugaaguggugcacucagca

SEQ ID NO: 2874 - RNA, 19 nt, artificial
  Oligomer
auaucacuuuccuccaucu

SEQ ID NO: 2875 - RNA, 19 nt, artificial
  Oligomer
auaaugcagagcuggcucc

SEQ ID NO: 2876 - RNA, 19 nt, artificial
  Oligomer
ugcuccucauucaauuuca

SEQ ID NO: 2877 - RNA, 19 nt, artificial
  Oligomer
uagaugugguccucaucug

SEQ ID NO: 2878 - RNA, 19 nt, artificial
  Oligomer
uguuggugaacuuccacuu

SEQ ID NO: 2879 - RNA, 19 nt, artificial
  Oligomer
uuuguagauucugccgaga

SEQ ID NO: 2880 - RNA, 19 nt, artificial
  Oligomer
cgagauuugagccucaugg

SEQ ID NO: 2881 - RNA, 19 nt, artificial
  Oligomer
ucacuuaucuggauuugag

SEQ ID NO: 2882 - RNA, 19 nt, artificial
  Oligomer
acaucaaacgucucacagg

SEQ ID NO: 2883 - RNA, 19 nt, artificial
  Oligomer
ugaagagcgauuucuucag

SEQ ID NO: 2884 - RNA, 19 nt, artificial
  Oligomer
agauguucuucacuguggg

SEQ ID NO: 2885 - RNA, 19 nt, artificial
  Oligomer
cagacauggguuuuccagg

SEQ ID NO: 2886 - RNA, 19 nt, artificial
  Oligomer
guugaucucaacgacagcc

SEQ ID NO: 2887 - RNA, 19 nt, artificial
  Oligomer
gucaggugggauuucgaag

SEQ ID NO: 2888 - RNA, 19 nt, artificial
  Oligomer
ugggauuucgaagagcuca

SEQ ID NO: 2889 - RNA, 19 nt, artificial
  Oligomer
uugguggaguaacgcacgu

SEQ ID NO: 2890 - RNA, 19 nt, artificial
  Oligomer
auucgauagcuugagguag

SEQ ID NO: 2891 - RNA, 19 nt, artificial
  Oligomer
uucuccacauuguuguuga

SEQ ID NO: 2892 - RNA, 19 nt, artificial
  Oligomer
uccacauuguuguugaugu

SEQ ID NO: 2893 - RNA, 19 nt, artificial
  Oligomer
ucauugcauacugguggaa

SEQ ID NO: 2894 - RNA, 19 nt, artificial
  Oligomer
uggucuugaacagaaauuu

SEQ ID NO: 2895 - RNA, 19 nt, artificial
  Oligomer
auacagggaagacccaagu

SEQ ID NO: 2896 - RNA, 19 nt, artificial
  Oligomer
aggaaauaagacuugaggc

SEQ ID NO: 2897 - RNA, 19 nt, artificial
  Oligomer
uggcuuuacaaagcagguc

SEQ ID NO: 2898 - RNA, 19 nt, artificial
  Oligomer
aaauaguccucgaccugcu

SEQ ID NO: 2899 - RNA, 19 nt, artificial
  Oligomer
acauagaccuugggcuugc

SEQ ID NO: 2900 - RNA, 19 nt, artificial
  Oligomer
augaggaugcaaggauggg

SEQ ID NO: 2901 - RNA, 19 nt, artificial
  Oligomer
acuuuguagauucugccga

SEQ ID NO: 2902 - RNA, 19 nt, artificial
  Oligomer
guucuuggcaugcaugcug

SEQ ID NO: 2903 - RNA, 19 nt, artificial
  Oligomer
uaccugaauuuguuguuga

SEQ ID NO: 2904 - RNA, 19 nt, artificial
  Oligomer
agccuguacuuauccaugc

SEQ ID NO: 2905 - RNA, 19 nt, artificial
  Oligomer
cucaguuuucgacucgcua

SEQ ID NO: 2906 - RNA, 19 nt, artificial
  Oligomer
agcuuugaccaagacuuuc

SEQ ID NO: 2907 - RNA, 19 nt, artificial
  Oligomer
ucucuucucuugggucucc

SEQ ID NO: 2908 - RNA, 19 nt, artificial
  Oligomer
uuccaggccucuaccugau

SEQ ID NO: 2909 - RNA, 19 nt, artificial
  Oligomer
uguaccagccauugaaggg

SEQ ID NO: 2910 - RNA, 19 nt, artificial
  Oligomer
uugagaacuucgggacugu

SEQ ID NO: 2911 - RNA, 19 nt, artificial
  Oligomer
ugagaacuucgggacuguc

SEQ ID NO: 2912 - RNA, 19 nt, artificial
  Oligomer
ucaaagguggccgagagau

SEQ ID NO: 2913 - RNA, 19 nt, artificial
  Oligomer
uccucuauuuuugccucuu

SEQ ID NO: 2914 - RNA, 19 nt, artificial
  Oligomer
aaagguggccgagagauuu

SEQ ID NO: 2915 - RNA, 19 nt, artificial
  Oligomer
cuuauggugaagugugucu

SEQ ID NO: 2916 - RNA, 19 nt, artificial
  Oligomer
caucaaggaaucauacagg

SEQ ID NO: 2917 - RNA, 19 nt, artificial
  Oligomer
aaauaagacuugaggcugg

SEQ ID NO: 2918 - RNA, 19 nt, artificial
  Oligomer
accaaagauaucuucguga

SEQ ID NO: 2919 - RNA, 19 nt, artificial
  Oligomer
cugcuccucauucaauuuc

SEQ ID NO: 2920 - RNA, 19 nt, artificial
  Oligomer
agcaggucacuuaugucac

SEQ ID NO: 2921 - RNA, 19 nt, artificial
  Oligomer
uccugguagaugugguccu

SEQ ID NO: 2922 - RNA, 19 nt, artificial
  Oligomer
ucaggcuguugagccaugu

SEQ ID NO: 2923 - RNA, 19 nt, artificial
  Oligomer
uugcuguacucugagggcu

SEQ ID NO: 2924 - RNA, 19 nt, artificial
  Oligomer
ucuggauuugagcucagau

SEQ ID NO: 2925 - RNA, 19 nt, artificial
  Oligomer
ucagcaugaagagcgauuu

SEQ ID NO: 2926 - RNA, 19 nt, artificial
  Oligomer
cuuucaauggaaucucucu

SEQ ID NO: 2927 - RNA, 19 nt, artificial
  Oligomer
auucuccugcccacuuccu

SEQ ID NO: 2928 - RNA, 19 nt, artificial
  Oligomer
uuagcuccaguucccgaaa

SEQ ID NO: 2929 - RNA, 19 nt, artificial
  Oligomer
ugcacagcugagugaauuc

SEQ ID NO: 2930 - RNA, 19 nt, artificial
  Oligomer
gugaauuccacguuggcag

SEQ ID NO: 2931 - RNA, 19 nt, artificial
  Oligomer
aucugguagccagcauagc

SEQ ID NO: 2932 - RNA, 19 nt, artificial
  Oligomer
uugccucuuugaaggagcc

SEQ ID NO: 2933 - RNA, 19 nt, artificial
  Oligomer
uagcuugagguagaagcuc

SEQ ID NO: 2934 - RNA, 19 nt, artificial
  Oligomer
guugcauccagcuugacca

SEQ ID NO: 2935 - RNA, 19 nt, artificial
  Oligomer
uugcauccagcuugaccag

SEQ ID NO: 2936 - RNA, 19 nt, artificial
  Oligomer
cucauucugcugcuugcug

SEQ ID NO: 2937 - RNA, 19 nt, artificial
  Oligomer
ccauucauugcauacuggu

SEQ ID NO: 2938 - RNA, 19 nt, artificial
  Oligomer
ugguggucacuugaagugg

SEQ ID NO: 2939 - RNA, 19 nt, artificial
  Oligomer
caucuuucacccacuugcc

SEQ ID NO: 2940 - RNA, 19 nt, artificial
  Oligomer
gauaucacuuuccuccauc

SEQ ID NO: 2941 - RNA, 19 nt, artificial
  Oligomer
cauccuuaaguucugugcc

SEQ ID NO: 2942 - RNA, 19 nt, artificial
  Oligomer
ucuucgugauagcgcuucu

SEQ ID NO: 2943 - RNA, 19 nt, artificial
  Oligomer
aaagcaggucacuuauguc

SEQ ID NO: 2944 - RNA, 19 nt, artificial
  Oligomer
acagucagguggaucucug

SEQ ID NO: 2945 - RNA, 19 nt, artificial
  Oligomer
ugucacuuaucuggauuug

SEQ ID NO: 2946 - RNA, 19 nt, artificial
  Oligomer
uuugagccucauggugaac

SEQ ID NO: 2947 - RNA, 19 nt, artificial
  Oligomer
ucacauuggagguguagag

SEQ ID NO: 2948 - RNA, 19 nt, artificial
  Oligomer
auuuguuguugagcucuuu

SEQ ID NO: 2949 - RNA, 19 nt, artificial
  Oligomer
guauucauucugcauguac

SEQ ID NO: 2950 - RNA, 19 nt, artificial
  Oligomer
agcacagcaauguugaucu

SEQ ID NO: 2951 - RNA, 19 nt, artificial
  Oligomer
ucucugugcccauguacca

SEQ ID NO: 2952 - RNA, 19 nt, artificial
  Oligomer
uucaaacauuucccgggca

SEQ ID NO: 2953 - RNA, 19 nt, artificial
  Oligomer
aagaugagcucaucucccg

SEQ ID NO: 2954 - RNA, 19 nt, artificial
  Oligomer
uuuugccucuuugaaggag

SEQ ID NO: 2955 - RNA, 19 nt, artificial
  Oligomer
caagauuuggaccugcaag

SEQ ID NO: 2956 - RNA, 19 nt, artificial
  Oligomer
uuggaccugcaaguuaaaa

SEQ ID NO: 2957 - RNA, 19 nt, artificial
  Oligomer
cugcaaguuaaaaucccuu

SEQ ID NO: 2958 - RNA, 19 nt, artificial
  Oligomer
gucuuggaaagucaucccg

SEQ ID NO: 2959 - RNA, 19 nt, artificial
  Oligomer
agauuuuaaagcaggaaug

SEQ ID NO: 2960 - RNA, 19 nt, artificial
  Oligomer
ugaccagagauucuggaga

SEQ ID NO: 2961 - RNA, 19 nt, artificial
  Oligomer
aucucuauggcuuuacaaa

SEQ ID NO: 2962 - RNA, 19 nt, artificial
  Oligomer
uggcuccauccuuaaguuc

SEQ ID NO: 2963 - RNA, 19 nt, artificial
  Oligomer
aaagauaucuucgugauag

SEQ ID NO: 2964 - RNA, 19 nt, artificial
  Oligomer
auagcgcuucuggcucuug

SEQ ID NO: 2965 - RNA, 19 nt, artificial
  Oligomer
accugcuccucauucaauu

SEQ ID NO: 2966 - RNA, 19 nt, artificial
  Oligomer
aacauagaccuugggcuug

SEQ ID NO: 2967 - RNA, 19 nt, artificial
  Oligomer
acuuccacuugcuguacuc

SEQ ID NO: 2968 - RNA, 19 nt, artificial
  Oligomer
cuuaugucacuuaucugga

SEQ ID NO: 2969 - RNA, 19 nt, artificial
  Oligomer
guacuggucaccaccaaca

SEQ ID NO: 2970 - RNA, 19 nt, artificial
  Oligomer
cagccuguacuuauccaug

SEQ ID NO: 2971 - RNA, 19 nt, artificial
  Oligomer
cugauuuuccugucucugu

SEQ ID NO: 2972 - RNA, 19 nt, artificial
  Oligomer
uugucuugcgcaucagcau

SEQ ID NO: 2973 - RNA, 19 nt, artificial
  Oligomer
ggaaucucucuucucuugg

SEQ ID NO: 2974 - RNA, 19 nt, artificial
  Oligomer
accagccaaauccagucug

SEQ ID NO: 2975 - RNA, 19 nt, artificial
  Oligomer
auguugaucucaacgacag

SEQ ID NO: 2976 - RNA, 19 nt, artificial
  Oligomer
cuuuagcuccaguucccga

SEQ ID NO: 2977 - RNA, 19 nt, artificial
  Oligomer
gauguguucaaacauuucc

SEQ ID NO: 2978 - RNA, 19 nt, artificial
  Oligomer
aucgaagaccugcagguug

SEQ ID NO: 2979 - RNA, 19 nt, artificial
  Oligomer
gguagguuccuguuguuuc

SEQ ID NO: 2980 - RNA, 19 nt, artificial
  Oligomer
uucgauagcuugagguaga

SEQ ID NO: 2981 - RNA, 19 nt, artificial
  Oligomer
gauagcuugagguagaagc

SEQ ID NO: 2982 - RNA, 19 nt, artificial
  Oligomer
guuaaaaucccuuuggccu

SEQ ID NO: 2983 - RNA, 19 nt, artificial
  Oligomer
gagguugugauacugaagg

SEQ ID NO: 2984 - RNA, 19 nt, artificial
  Oligomer
auccugugucacuggacug

SEQ ID NO: 2985 - RNA, 19 nt, artificial
  Oligomer
aagaaauaguccucgaccu

SEQ ID NO: 2986 - RNA, 19 nt, artificial
  Oligomer
uagaaccugggcuucagaa

SEQ ID NO: 2987 - RNA, 19 nt, artificial
  Oligomer
acguucuuggcaugcaugc

SEQ ID NO: 2988 - RNA, 19 nt, artificial
  Oligomer
auuggagguguagagcuug

SEQ ID NO: 2989 - RNA, 19 nt, artificial
  Oligomer
cugccuugaagguuugcac

SEQ ID NO: 2990 - RNA, 19 nt, artificial
  Oligomer
ugagcucagauguucuuca

SEQ ID NO: 2991 - RNA, 19 nt, artificial
  Oligomer
ggucacauucugcuucugg

SEQ ID NO: 2992 - RNA, 19 nt, artificial
  Oligomer
cugcuucuggaaacuaugg

SEQ ID NO: 2993 - RNA, 19 nt, artificial
  Oligomer
cugagugaauuccacguug

SEQ ID NO: 2994 - RNA, 19 nt, artificial
  Oligomer
ugcuugguggcgaagauga

SEQ ID NO: 2995 - RNA, 19 nt, artificial
  Oligomer
aguuaaaaucccuuuggcc

SEQ ID NO: 2996 - RNA, 19 nt, artificial
  Oligomer
caguuuuugauccucacau

SEQ ID NO: 2997 - RNA, 19 nt, artificial
  Oligomer
acugguggaauuuggucuu

SEQ ID NO: 2998 - RNA, 19 nt, artificial
  Oligomer
uuuggucuugaacagaaau

SEQ ID NO: 2999 - RNA, 19 nt, artificial
  Oligomer
ucauacagggaagacccaa

SEQ ID NO: 3000 - RNA, 19 nt, artificial
  Oligomer
cuugaaguggugcacucag

SEQ ID NO: 3001 - RNA, 19 nt, artificial
  Oligomer
acguugaggaaauaagacu

SEQ ID NO: 3002 - RNA, 19 nt, artificial
  Oligomer
ugaccucagauaaugcaga

SEQ ID NO: 3003 - RNA, 19 nt, artificial
  Oligomer
gcuggcuccauccuuaagu

SEQ ID NO: 3004 - RNA, 19 nt, artificial
  Oligomer
ucgccucguaaggaaauac

SEQ ID NO: 3005 - RNA, 19 nt, artificial
  Oligomer
cuucgugauagcgcuucug

SEQ ID NO: 3006 - RNA, 19 nt, artificial
  Oligomer
cucucugcuugaauuuuaa

SEQ ID NO: 3007 - RNA, 19 nt, artificial
  Oligomer
ccacaaccucaaaacaaaa

SEQ ID NO: 3008 - RNA, 19 nt, artificial
  Oligomer
ccggaggaguuauuuugaa

SEQ ID NO: 3009 - RNA, 19 nt, artificial
  Oligomer
ccugaguuuugguuuguaa

SEQ ID NO: 3010 - RNA, 19 nt, artificial
  Oligomer
gucacuuuaggauaagaau

SEQ ID NO: 3011 - RNA, 19 nt, artificial
  Oligomer
accacaaccucaaaacaaa

SEQ ID NO: 3012 - RNA, 19 nt, artificial
  Oligomer
ggugguucagaguuauaca

SEQ ID NO: 3013 - RNA, 19 nt, artificial
  Oligomer
gagaaggaaggcagaauaa

SEQ ID NO: 3014 - RNA, 19 nt, artificial
  Oligomer
uguuaugcacccauccaaa

SEQ ID NO: 3015 - RNA, 19 nt, artificial
  Oligomer
ugggaaacugggugguuaa

SEQ ID NO: 3016 - RNA, 19 nt, artificial
  Oligomer
ccuaucucaugaugagaaa

SEQ ID NO: 3017 - RNA, 19 nt, artificial
  Oligomer
ggauccuuucucagaaaaa

SEQ ID NO: 3018 - RNA, 19 nt, artificial
  Oligomer
auaugagaaggccgacaaa

SEQ ID NO: 3019 - RNA, 19 nt, artificial
  Oligomer
ggacaaugaguuuucuaca

SEQ ID NO: 3020 - RNA, 19 nt, artificial
  Oligomer
agaaggaaggcagaauaaa

SEQ ID NO: 3021 - RNA, 19 nt, artificial
  Oligomer
gacaggucugaaacagaaa

SEQ ID NO: 3022 - RNA, 19 nt, artificial
  Oligomer
ccugagucuuggaagugga

SEQ ID NO: 3023 - RNA, 19 nt, artificial
  Oligomer
agucacuuuaggauaagaa

SEQ ID NO: 3024 - RNA, 19 nt, artificial
  Oligomer
cacugagaaagcaauugga

SEQ ID NO: 3025 - RNA, 19 nt, artificial
  Oligomer
gggcuuucgaacaacaaua

SEQ ID NO: 3026 - RNA, 19 nt, artificial
  Oligomer
accucuugacaaugggaaa

SEQ ID NO: 3027 - RNA, 19 nt, artificial
  Oligomer
caaacagaggagagcauga

SEQ ID NO: 3028 - RNA, 19 nt, artificial
  Oligomer
ugcagaccacaaccucaaa

SEQ ID NO: 3029 - RNA, 19 nt, artificial
  Oligomer
caacuuaagaacuucugaa

SEQ ID NO: 3030 - RNA, 19 nt, artificial
  Oligomer
caauauucaccaauuccca

SEQ ID NO: 3031 - RNA, 19 nt, artificial
  Oligomer
cuggagugaucaugacaau

SEQ ID NO: 3032 - RNA, 19 nt, artificial
  Oligomer
caauagccuugauucucau

SEQ ID NO: 3033 - RNA, 19 nt, artificial
  Oligomer
gguucagaguuauacaacu

SEQ ID NO: 3034 - RNA, 19 nt, artificial
  Oligomer
agagaaggaaggcagaaua

SEQ ID NO: 3035 - RNA, 19 nt, artificial
  Oligomer
cccaggugauuuuaucaau

SEQ ID NO: 3036 - RNA, 19 nt, artificial
  Oligomer
gcaacuuaagaacuucuga

SEQ ID NO: 3037 - RNA, 19 nt, artificial
  Oligomer
cauucauauccgagcagca

SEQ ID NO: 3038 - RNA, 19 nt, artificial
  Oligomer
caucuuaaaggcucacaga

SEQ ID NO: 3039 - RNA, 19 nt, artificial
  Oligomer
caguguuaccaucuccuga

SEQ ID NO: 3040 - RNA, 19 nt, artificial
  Oligomer
gauuuucuucuucacuuga

SEQ ID NO: 3041 - RNA, 19 nt, artificial
  Oligomer
gguagguguguguuuuuca

SEQ ID NO: 3042 - RNA, 19 nt, artificial
  Oligomer
gcuacugaguucauccgga

SEQ ID NO: 3043 - RNA, 19 nt, artificial
  Oligomer
cacaguucuguccagagaa

SEQ ID NO: 3044 - RNA, 19 nt, artificial
  Oligomer
cuucuaucuugaaauccau

SEQ ID NO: 3045 - RNA, 19 nt, artificial
  Oligomer
cauggauccuuucucagaa

SEQ ID NO: 3046 - RNA, 19 nt, artificial
  Oligomer
ugaaguucuuaaagcccau

SEQ ID NO: 3047 - RNA, 19 nt, artificial
  Oligomer
cauugcuggucucacugga

SEQ ID NO: 3048 - RNA, 19 nt, artificial
  Oligomer
cccuuugcuucuaucuuga

SEQ ID NO: 3049 - RNA, 19 nt, artificial
  Oligomer
acaaccucaccuuccacaa

SEQ ID NO: 3050 - RNA, 19 nt, artificial
  Oligomer
uguggaugccuuccugaaa

SEQ ID NO: 3051 - RNA, 19 nt, artificial
  Oligomer
cuuugcuucuaucuugaaa

SEQ ID NO: 3052 - RNA, 19 nt, artificial
  Oligomer
ggaaggcagaauaaacuua

SEQ ID NO: 3053 - RNA, 19 nt, artificial
  Oligomer
ggauuuucuucuucacuug

SEQ ID NO: 3054 - RNA, 19 nt, artificial
  Oligomer
gacaguggaguaugugaca

SEQ ID NO: 3055 - RNA, 19 nt, artificial
  Oligomer
aguagggugacuuuuuaaa

SEQ ID NO: 3056 - RNA, 19 nt, artificial
  Oligomer
ccucaaucucucuccugga

SEQ ID NO: 3057 - RNA, 19 nt, artificial
  Oligomer
cuucguuacuugagcuuca

SEQ ID NO: 3058 - RNA, 19 nt, artificial
  Oligomer
cucuuuguaucuucaguaa

SEQ ID NO: 3059 - RNA, 19 nt, artificial
  Oligomer
gaaucuucccuguugccua

SEQ ID NO: 3060 - RNA, 19 nt, artificial
  Oligomer
ccaggugauuuuaucaauu

SEQ ID NO: 3061 - RNA, 19 nt, artificial
  Oligomer
ccagaauccggauugcuga

SEQ ID NO: 3062 - RNA, 19 nt, artificial
  Oligomer
ugacaggucugaaacagaa

SEQ ID NO: 3063 - RNA, 19 nt, artificial
  Oligomer
ccuuugcuucuaucuugaa

SEQ ID NO: 3064 - RNA, 19 nt, artificial
  Oligomer
gcagaccacaaccucaaaa

SEQ ID NO: 3065 - RNA, 19 nt, artificial
  Oligomer
ugugcagagucuuuugaga

SEQ ID NO: 3066 - RNA, 19 nt, artificial
  Oligomer
cagucacuuuaggauaaga

SEQ ID NO: 3067 - RNA, 19 nt, artificial
  Oligomer
aaguagggugacuuuuuaa

SEQ ID NO: 3068 - RNA, 19 nt, artificial
  Oligomer
ccaacaguguacauguuua

SEQ ID NO: 3069 - RNA, 19 nt, artificial
  Oligomer
gauucucaugguaacuuca

SEQ ID NO: 3070 - RNA, 19 nt, artificial
  Oligomer
gaguuuucuacaauagcua

SEQ ID NO: 3071 - RNA, 19 nt, artificial
  Oligomer
cugaguuuugguuuguaau

SEQ ID NO: 3072 - RNA, 19 nt, artificial
  Oligomer
guuggucaugcagcauuaa

SEQ ID NO: 3073 - RNA, 19 nt, artificial
  Oligomer
gaccacaaccucaaaacaa

SEQ ID NO: 3074 - RNA, 19 nt, artificial
  Oligomer
agguucaauucuacuucaa

SEQ ID NO: 3075 - RNA, 19 nt, artificial
  Oligomer
gcauuuugucucuuuguau

SEQ ID NO: 3076 - RNA, 19 nt, artificial
  Oligomer
ccaccuuuuuaucuucuau

SEQ ID NO: 3077 - RNA, 19 nt, artificial
  Oligomer
cucugcuugaauuuuaaca

SEQ ID NO: 3078 - RNA, 19 nt, artificial
  Oligomer
gaaggaaggcagaauaaac

SEQ ID NO: 3079 - RNA, 19 nt, artificial
  Oligomer
aucacaaccucaccuucca

SEQ ID NO: 3080 - RNA, 19 nt, artificial
  Oligomer
ccugguauucuuuuuuuga

SEQ ID NO: 3081 - RNA, 19 nt, artificial
  Oligomer
ggcugaauguuuuccuguu

SEQ ID NO: 3082 - RNA, 19 nt, artificial
  Oligomer
guguguuuuucacaucuua

SEQ ID NO: 3083 - RNA, 19 nt, artificial
  Oligomer
ggauguuuuccaguaugaa

SEQ ID NO: 3084 - RNA, 19 nt, artificial
  Oligomer
gugguucagaguuauacaa

SEQ ID NO: 3085 - RNA, 19 nt, artificial
  Oligomer
auaggaauaaggacgguaa

SEQ ID NO: 3086 - RNA, 19 nt, artificial
  Oligomer
gucugcucucugcuugaau

SEQ ID NO: 3087 - RNA, 19 nt, artificial
  Oligomer
ggaucacaaccucaccuuc

SEQ ID NO: 3088 - RNA, 19 nt, artificial
  Oligomer
ccuggaauggcauccuuuu

SEQ ID NO: 3089 - RNA, 19 nt, artificial
  Oligomer
aggauuuucuucuucacuu

SEQ ID NO: 3090 - RNA, 19 nt, artificial
  Oligomer
cgcaaaugcugucaccgau

SEQ ID NO: 3091 - RNA, 19 nt, artificial
  Oligomer
gaaggcagaauaaacuuau

SEQ ID NO: 3092 - RNA, 19 nt, artificial
  Oligomer
ccuuccugaaauaugagaa

SEQ ID NO: 3093 - RNA, 19 nt, artificial
  Oligomer
cagucuggauccuagaaag

SEQ ID NO: 3094 - RNA, 19 nt, artificial
  Oligomer
gguucuuggcuaaauccca

SEQ ID NO: 3095 - RNA, 19 nt, artificial
  Oligomer
acaggucugaaacagaaaa

SEQ ID NO: 3096 - RNA, 19 nt, artificial
  Oligomer
gcuuagggauucacggcau

SEQ ID NO: 3097 - RNA, 19 nt, artificial
  Oligomer
ggucaugcagcauuaaacu

SEQ ID NO: 3098 - RNA, 19 nt, artificial
  Oligomer
cacagaagauuucuaagua

SEQ ID NO: 3099 - RNA, 19 nt, artificial
  Oligomer
agaugugggaugaucguga

SEQ ID NO: 3100 - RNA, 19 nt, artificial
  Oligomer
gauccuuucucagaaaaau

SEQ ID NO: 3101 - RNA, 19 nt, artificial
  Oligomer
ucucauaagggcuuucgaa

SEQ ID NO: 3102 - RNA, 19 nt, artificial
  Oligomer
ggaguuauuuugaagucuu

SEQ ID NO: 3103 - RNA, 19 nt, artificial
  Oligomer
gcagcauuaaacuuugaca

SEQ ID NO: 3104 - RNA, 19 nt, artificial
  Oligomer
gggacuggacagaaaaucu

SEQ ID NO: 3105 - RNA, 19 nt, artificial
  Oligomer
uaggaauaaggacgguaau

SEQ ID NO: 3106 - RNA, 19 nt, artificial
  Oligomer
agcaaggcuugauagcaga

SEQ ID NO: 3107 - RNA, 19 nt, artificial
  Oligomer
gaaacugggugguuaacca

SEQ ID NO: 3108 - RNA, 19 nt, artificial
  Oligomer
aagggcuuucgaacaacaa

SEQ ID NO: 3109 - RNA, 19 nt, artificial
  Oligomer
guagggugacuuuuuaaau

SEQ ID NO: 3110 - RNA, 19 nt, artificial
  Oligomer
ccuauaugaucugccuaca

SEQ ID NO: 3111 - RNA, 19 nt, artificial
  Oligomer
cagugaggauguuuuccag

SEQ ID NO: 3112 - RNA, 19 nt, artificial
  Oligomer
ggugauuuuaucaauucca

SEQ ID NO: 3113 - RNA, 19 nt, artificial
  Oligomer
acuggagugaucaugacaa

SEQ ID NO: 3114 - RNA, 19 nt, artificial
  Oligomer
gagugaucaugacaauagc

SEQ ID NO: 3115 - RNA, 19 nt, artificial
  Oligomer
ccagagaaggaaggcagaa

SEQ ID NO: 3116 - RNA, 19 nt, artificial
  Oligomer
cuagaaagguucaauucua

SEQ ID NO: 3117 - RNA, 19 nt, artificial
  Oligomer
ugccuagaagggcuccaaa

SEQ ID NO: 3118 - RNA, 19 nt, artificial
  Oligomer
ccaagucuguagugggagu

SEQ ID NO: 3119 - RNA, 19 nt, artificial
  Oligomer
cggaggaguuauuuugaag

SEQ ID NO: 3120 - RNA, 19 nt, artificial
  Oligomer
aaaggauccuccgguuuua

SEQ ID NO: 3121 - RNA, 19 nt, artificial
  Oligomer
cugagucuuggaaguggau

SEQ ID NO: 3122 - RNA, 19 nt, artificial
  Oligomer
agaccacaaccucaaaaca

SEQ ID NO: 3123 - RNA, 19 nt, artificial
  Oligomer
gagguuuggugguucagag

SEQ ID NO: 3124 - RNA, 19 nt, artificial
  Oligomer
ugaguuauaggaauaagga

SEQ ID NO: 3125 - RNA, 19 nt, artificial
  Oligomer
aggagagcaugaaugagag

SEQ ID NO: 3126 - RNA, 19 nt, artificial
  Oligomer
gcuuccugugugucgcaau

SEQ ID NO: 3127 - RNA, 19 nt, artificial
  Oligomer
cacuuuaggauaagaaugu

SEQ ID NO: 3128 - RNA, 19 nt, artificial
  Oligomer
cggcauugguggaauuguc

SEQ ID NO: 3129 - RNA, 19 nt, artificial
  Oligomer
ggucaaacagaggagagca

SEQ ID NO: 3130 - RNA, 19 nt, artificial
  Oligomer
cagaauccggauugcugaa

SEQ ID NO: 3131 - RNA, 19 nt, artificial
  Oligomer
aacuguaaaucuuucugga

SEQ ID NO: 3132 - RNA, 19 nt, artificial
  Oligomer
ccgcacacugagaaagcaa

SEQ ID NO: 3133 - RNA, 19 nt, artificial
  Oligomer
uguagugggaguuuucuua

SEQ ID NO: 3134 - RNA, 19 nt, artificial
  Oligomer
cagaaaaccuccuuuggga

SEQ ID NO: 3135 - RNA, 19 nt, artificial
  Oligomer
cacaccuguuuaacuuuga

SEQ ID NO: 3136 - RNA, 19 nt, artificial
  Oligomer
ccaaaguuuuggaauugca

SEQ ID NO: 3137 - RNA, 19 nt, artificial
  Oligomer
uggaauugcagaugaacaa

SEQ ID NO: 3138 - RNA, 19 nt, artificial
  Oligomer
cuggaauggcauccuuuua

SEQ ID NO: 3139 - RNA, 19 nt, artificial
  Oligomer
cuauucacaucauugcaca

SEQ ID NO: 3140 - RNA, 19 nt, artificial
  Oligomer
cgucagguuugagcaguca

SEQ ID NO: 3141 - RNA, 19 nt, artificial
  Oligomer
cccuaaguuugaagggcau

SEQ ID NO: 3142 - RNA, 19 nt, artificial
  Oligomer
ccagcagaagguugugauu

SEQ ID NO: 3143 - RNA, 19 nt, artificial
  Oligomer
ccagccuaucucaugauga

SEQ ID NO: 3144 - RNA, 19 nt, artificial
  Oligomer
ugcugucaccgauauucca

SEQ ID NO: 3145 - RNA, 19 nt, artificial
  Oligomer
aguucauccggaggaguua

SEQ ID NO: 3146 - RNA, 19 nt, artificial
  Oligomer
uguuuacugucacuuuuga

SEQ ID NO: 3147 - RNA, 19 nt, artificial
  Oligomer
cagagaaggaaggcagaau

SEQ ID NO: 3148 - RNA, 19 nt, artificial
  Oligomer
cugccuacauacagcuauu

SEQ ID NO: 3149 - RNA, 19 nt, artificial
  Oligomer
ggcuuucgaacaacaauau

SEQ ID NO: 3150 - RNA, 19 nt, artificial
  Oligomer
aguucuuaaagcccaugga

SEQ ID NO: 3151 - RNA, 19 nt, artificial
  Oligomer
aacagaggagagcaugaau

SEQ ID NO: 3152 - RNA, 19 nt, artificial
  Oligomer
gauucacggcauuggugga

SEQ ID NO: 3153 - RNA, 19 nt, artificial
  Oligomer
acgacaguggaguauguga

SEQ ID NO: 3154 - RNA, 19 nt, artificial
  Oligomer
ccaucugguacaaauucca

SEQ ID NO: 3155 - RNA, 19 nt, artificial
  Oligomer
uuuuggaauugcagaugaa

SEQ ID NO: 3156 - RNA, 19 nt, artificial
  Oligomer
cgcacacugagaaagcaau

SEQ ID NO: 3157 - RNA, 19 nt, artificial
  Oligomer
cacaaccucaaaacaaaaa

SEQ ID NO: 3158 - RNA, 19 nt, artificial
  Oligomer
caauuggaucacaaccuca

SEQ ID NO: 3159 - RNA, 19 nt, artificial
  Oligomer
agagguuuggugguucaga

SEQ ID NO: 3160 - RNA, 19 nt, artificial
  Oligomer
cuucuauauccuuggcuua

SEQ ID NO: 3161 - RNA, 19 nt, artificial
  Oligomer
cagcauuaaacuuugacaa

SEQ ID NO: 3162 - RNA, 19 nt, artificial
  Oligomer
agagcaugaaugagaguca

SEQ ID NO: 3163 - RNA, 19 nt, artificial
  Oligomer
caaaguuuuggaauugcag

SEQ ID NO: 3164 - RNA, 19 nt, artificial
  Oligomer
gaguaugugacauucacca

SEQ ID NO: 3165 - RNA, 19 nt, artificial
  Oligomer
acaucgugacaggucugaa

SEQ ID NO: 3166 - RNA, 19 nt, artificial
  Oligomer
cacuuuugauauggucuua

SEQ ID NO: 3167 - RNA, 19 nt, artificial
  Oligomer
gaagguugugauuaccaag

SEQ ID NO: 3168 - RNA, 19 nt, artificial
  Oligomer
ucucugcuugaauuuuaac

SEQ ID NO: 3169 - RNA, 19 nt, artificial
  Oligomer
ggagagcaugaaugagagu

SEQ ID NO: 3170 - RNA, 19 nt, artificial
  Oligomer
acuguagcaaggcuugaua

SEQ ID NO: 3171 - RNA, 19 nt, artificial
  Oligomer
cuaucucaugaugagaaaa

SEQ ID NO: 3172 - RNA, 19 nt, artificial
  Oligomer
gcacaguucuguccagaga

SEQ ID NO: 3173 - RNA, 19 nt, artificial
  Oligomer
cuacaauagcuaccuccca

SEQ ID NO: 3174 - RNA, 19 nt, artificial
  Oligomer
ugcucucugcuugaauuuu

SEQ ID NO: 3175 - RNA, 19 nt, artificial
  Oligomer
uggagugaucaugacaaua

SEQ ID NO: 3176 - RNA, 19 nt, artificial
  Oligomer
caccucuugacaaugggaa

SEQ ID NO: 3177 - RNA, 19 nt, artificial
  Oligomer
uuguuaugcacccauccaa

SEQ ID NO: 3178 - RNA, 19 nt, artificial
  Oligomer
gaggaagauuucuucucca

SEQ ID NO: 3179 - RNA, 19 nt, artificial
  Oligomer
ugaggauguuuuccaguau

SEQ ID NO: 3180 - RNA, 19 nt, artificial
  Oligomer
gaacuucugaaguucuuaa

SEQ ID NO: 3181 - RNA, 19 nt, artificial
  Oligomer
caguggaguaugugacauu

SEQ ID NO: 3182 - RNA, 19 nt, artificial
  Oligomer
gugacaggucugaaacaga

SEQ ID NO: 3183 - RNA, 19 nt, artificial
  Oligomer
guuacuugagcuucagcaa

SEQ ID NO: 3184 - RNA, 19 nt, artificial
  Oligomer
gugcagaccacaaccucaa

SEQ ID NO: 3185 - RNA, 19 nt, artificial
  Oligomer
ccuccuuugggagaccaau

SEQ ID NO: 3186 - RNA, 19 nt, artificial
  Oligomer
guucagaguuauacaacua

SEQ ID NO: 3187 - RNA, 19 nt, artificial
  Oligomer
cuguaaaucuuucuggaca

SEQ ID NO: 3188 - RNA, 19 nt, artificial
  Oligomer
ggacaaauguuccauuccu

SEQ ID NO: 3189 - RNA, 19 nt, artificial
  Oligomer
acaacuaaucccaggugau

SEQ ID NO: 3190 - RNA, 19 nt, artificial
  Oligomer
ggauccuagaaagguucaa

SEQ ID NO: 3191 - RNA, 19 nt, artificial
  Oligomer
caguuuuguuucugguugu

SEQ ID NO: 3192 - RNA, 19 nt, artificial
  Oligomer
aaaguuuuggaauugcaga

SEQ ID NO: 3193 - RNA, 19 nt, artificial
  Oligomer
ggaggaguuauuuugaagu

SEQ ID NO: 3194 - RNA, 19 nt, artificial
  Oligomer
cugaaguucuuaaagccca

SEQ ID NO: 3195 - RNA, 19 nt, artificial
  Oligomer
agaaaaauccuugggucaa

SEQ ID NO: 3196 - RNA, 19 nt, artificial
  Oligomer
ggcaccugcucauuuugca

SEQ ID NO: 3197 - RNA, 19 nt, artificial
  Oligomer
ugauuaccaagguuguuau

SEQ ID NO: 3198 - RNA, 19 nt, artificial
  Oligomer
aagucuucugguauacuca

SEQ ID NO: 3199 - RNA, 19 nt, artificial
  Oligomer
ugaaauaugagaaggccga

SEQ ID NO: 3200 - RNA, 19 nt, artificial
  Oligomer
agggauucacggcauuggu

SEQ ID NO: 3201 - RNA, 19 nt, artificial
  Oligomer
gggugguuaaccacugguu

SEQ ID NO: 3202 - RNA, 19 nt, artificial
  Oligomer
caaauguuccauuccugaa

SEQ ID NO: 3203 - RNA, 19 nt, artificial
  Oligomer
ccuugauucucaugguaac

SEQ ID NO: 3204 - RNA, 19 nt, artificial
  Oligomer
gguugugauuaccaagguu

SEQ ID NO: 3205 - RNA, 19 nt, artificial
  Oligomer
gacuggacagaaaaucuca

SEQ ID NO: 3206 - RNA, 19 nt, artificial
  Oligomer
cgaacaacaauauucacca

SEQ ID NO: 3207 - RNA, 19 nt, artificial
  Oligomer
cuuagggauucacggcauu

SEQ ID NO: 3208 - RNA, 19 nt, artificial
  Oligomer
gccuugacucccugguauu

SEQ ID NO: 3209 - RNA, 19 nt, artificial
  Oligomer
gagcaugaaugagagucau

SEQ ID NO: 3210 - RNA, 19 nt, artificial
  Oligomer
gguuaaccacugguuuuca

SEQ ID NO: 3211 - RNA, 19 nt, artificial
  Oligomer
cuauaugaucugccuacau

SEQ ID NO: 3212 - RNA, 19 nt, artificial
  Oligomer
uccggaggaguuauuuuga

SEQ ID NO: 3213 - RNA, 19 nt, artificial
  Oligomer
uuaggauaagaaugugccu

SEQ ID NO: 3214 - RNA, 19 nt, artificial
  Oligomer
cccauauaacaccaacagu

SEQ ID NO: 3215 - RNA, 19 nt, artificial
  Oligomer
ggugguuaaccacugguuu

SEQ ID NO: 3216 - RNA, 19 nt, artificial
  Oligomer
uaaguagggugacuuuuua

SEQ ID NO: 3217 - RNA, 19 nt, artificial
  Oligomer
cuccauucucuccagccua

SEQ ID NO: 3218 - RNA, 19 nt, artificial
  Oligomer
cauccaaaguuuuggaauu

SEQ ID NO: 3219 - RNA, 19 nt, artificial
  Oligomer
cuuugacugcuauagcaga

SEQ ID NO: 3220 - RNA, 19 nt, artificial
  Oligomer
gcugguuggagcaggaauu

SEQ ID NO: 3221 - RNA, 19 nt, artificial
  Oligomer
gaaugugccucucaagccu

SEQ ID NO: 3222 - RNA, 19 nt, artificial
  Oligomer
guggaguaugugacauuca

SEQ ID NO: 3223 - RNA, 19 nt, artificial
  Oligomer
ugaucaugacaauagccuu

SEQ ID NO: 3224 - RNA, 19 nt, artificial
  Oligomer
ggcagaauaaacuuauuca

SEQ ID NO: 3225 - RNA, 19 nt, artificial
  Oligomer
agucuuuugagauguggga

SEQ ID NO: 3226 - RNA, 19 nt, artificial
  Oligomer
caguguacauguuuacugu

SEQ ID NO: 3227 - RNA, 19 nt, artificial
  Oligomer
gcuggacaaauguuccauu

SEQ ID NO: 3228 - RNA, 19 nt, artificial
  Oligomer
aaucccauccagucccgaa

SEQ ID NO: 3229 - RNA, 19 nt, artificial
  Oligomer
acaaauguuccauuccuga

SEQ ID NO: 3230 - RNA, 19 nt, artificial
  Oligomer
uuguggaugccuuccugaa

SEQ ID NO: 3231 - RNA, 19 nt, artificial
  Oligomer
acuuauucauucccaggaa

SEQ ID NO: 3232 - RNA, 19 nt, artificial
  Oligomer
uggcauccuuuuacuuuga

SEQ ID NO: 3233 - RNA, 19 nt, artificial
  Oligomer
gagucauccucgcaagugu

SEQ ID NO: 3234 - RNA, 19 nt, artificial
  Oligomer
agggcuuucgaacaacaau

SEQ ID NO: 3235 - RNA, 19 nt, artificial
  Oligomer
guucuuaaagcccauggau

SEQ ID NO: 3236 - RNA, 19 nt, artificial
  Oligomer
cuuuauaucugugaaagga

SEQ ID NO: 3237 - RNA, 19 nt, artificial
  Oligomer
ccauccaaaguuuuggaau

SEQ ID NO: 3238 - RNA, 19 nt, artificial
  Oligomer
uuugaagucuucugguaua

SEQ ID NO: 3239 - RNA, 19 nt, artificial
  Oligomer
uggucuuauccagugugaa

SEQ ID NO: 3240 - RNA, 19 nt, artificial
  Oligomer
ccagucuggauccuagaaa

SEQ ID NO: 3241 - RNA, 19 nt, artificial
  Oligomer
cgguaaucugcauuuuguc

SEQ ID NO: 3242 - RNA, 19 nt, artificial
  Oligomer
cacaaccucaccuuccaca

SEQ ID NO: 3243 - RNA, 19 nt, artificial
  Oligomer
gugaaaggauccuccgguu

SEQ ID NO: 3244 - RNA, 19 nt, artificial
  Oligomer
uauaugaucugccuacaua

SEQ ID NO: 3245 - RNA, 19 nt, artificial
  Oligomer
ugcauuuugucucuuugua

SEQ ID NO: 3246 - RNA, 19 nt, artificial
  Oligomer
cugaaggaccucuccagaa

SEQ ID NO: 3247 - RNA, 19 nt, artificial
  Oligomer
aguuauacaacuaauccca

SEQ ID NO: 3248 - RNA, 19 nt, artificial
  Oligomer
aagguucaauucuacuuca

SEQ ID NO: 3249 - RNA, 19 nt, artificial
  Oligomer
gcuauagcagaagccgaca

SEQ ID NO: 3250 - RNA, 19 nt, artificial
  Oligomer
uuguuugguuagggcugaa

SEQ ID NO: 3251 - RNA, 19 nt, artificial
  Oligomer
gaauggcauccuuuuacuu

SEQ ID NO: 3252 - RNA, 19 nt, artificial
  Oligomer
ugagcuucagcaacuuaag

SEQ ID NO: 3253 - RNA, 19 nt, artificial
  Oligomer
cggucauucuuuauaucug

SEQ ID NO: 3254 - RNA, 19 nt, artificial
  Oligomer
gaaacagaaaaccuccuuu

SEQ ID NO: 3255 - RNA, 19 nt, artificial
  Oligomer
gccuugauucucaugguaa

SEQ ID NO: 3256 - RNA, 19 nt, artificial
  Oligomer
ccuacauacagcuauucac

SEQ ID NO: 3257 - RNA, 19 nt, artificial
  Oligomer
uggauccuuucucagaaaa

SEQ ID NO: 3258 - RNA, 19 nt, artificial
  Oligomer
ggacagaaaaucucauaag

SEQ ID NO: 3259 - RNA, 19 nt, artificial
  Oligomer
ugagaugugggaugaucgu

SEQ ID NO: 3260 - RNA, 19 nt, artificial
  Oligomer
uugagcuucagcaacuuaa

SEQ ID NO: 3261 - RNA, 19 nt, artificial
  Oligomer
cucucuccuggaauggcau

SEQ ID NO: 3262 - RNA, 19 nt, artificial
  Oligomer
gucucacuggagugaucau

SEQ ID NO: 3263 - RNA, 19 nt, artificial
  Oligomer
guagugggaguuuucuuau

SEQ ID NO: 3264 - RNA, 19 nt, artificial
  Oligomer
cauacagcuauucacauca

SEQ ID NO: 3265 - RNA, 19 nt, artificial
  Oligomer
ggaagauuucuucuccauu

SEQ ID NO: 3266 - RNA, 19 nt, artificial
  Oligomer
acaucauugcacaccuguu

SEQ ID NO: 3267 - RNA, 19 nt, artificial
  Oligomer
cuaaguagggugacuuuuu

SEQ ID NO: 3268 - RNA, 19 nt, artificial
  Oligomer
ccaccucuugacaauggga

SEQ ID NO: 3269 - RNA, 19 nt, artificial
  Oligomer
acgguaaucugcauuuugu

SEQ ID NO: 3270 - RNA, 19 nt, artificial
  Oligomer
agccuugauucucauggua

SEQ ID NO: 3271 - RNA, 19 nt, artificial
  Oligomer
ugcucauuuugcagccgca

SEQ ID NO: 3272 - RNA, 19 nt, artificial
  Oligomer
ugguuagggcugaauguuu

SEQ ID NO: 3273 - RNA, 19 nt, artificial
  Oligomer
cuguagugggaguuuucuu

SEQ ID NO: 3274 - RNA, 19 nt, artificial
  Oligomer
gaguuauaggaauaaggac

SEQ ID NO: 3275 - RNA, 19 nt, artificial
  Oligomer
cuucuccauucauauccga

SEQ ID NO: 3276 - RNA, 19 nt, artificial
  Oligomer
cauucaacuucguuacuug

SEQ ID NO: 3277 - RNA, 19 nt, artificial
  Oligomer
acugagaaagcaauuggau

SEQ ID NO: 3278 - RNA, 19 nt, artificial
  Oligomer
cuuugaccucugcuccaga

SEQ ID NO: 3279 - RNA, 19 nt, artificial
  Oligomer
guuguuugguuagggcuga

SEQ ID NO: 3280 - RNA, 19 nt, artificial
  Oligomer
aggccgacaaauacuacua

SEQ ID NO: 3281 - RNA, 19 nt, artificial
  Oligomer
cugguauacucaccaccuu

SEQ ID NO: 3282 - RNA, 19 nt, artificial
  Oligomer
gcuucagcaacuuaagaac

SEQ ID NO: 3283 - RNA, 19 nt, artificial
  Oligomer
uuggucaugcagcauuaaa

SEQ ID NO: 3284 - RNA, 19 nt, artificial
  Oligomer
ucuggauccuagaaagguu

SEQ ID NO: 3285 - RNA, 19 nt, artificial
  Oligomer
acauguuuacugucacuuu

SEQ ID NO: 3286 - RNA, 19 nt, artificial
  Oligomer
gucaaacagaggagagcau

SEQ ID NO: 3287 - RNA, 19 nt, artificial
  Oligomer
guuuacugucacuuuugau

SEQ ID NO: 3288 - RNA, 19 nt, artificial
  Oligomer
gccuaucucaugaugagaa

SEQ ID NO: 3289 - RNA, 19 nt, artificial
  Oligomer
ucuugaaauccaucuggua

SEQ ID NO: 3290 - RNA, 19 nt, artificial
  Oligomer
ggaauggcauccuuuuacu

SEQ ID NO: 3291 - RNA, 19 nt, artificial
  Oligomer
caaccucaaaacaaaaaag

SEQ ID NO: 3292 - RNA, 19 nt, artificial
  Oligomer
agauuucuucuccauucau

SEQ ID NO: 3293 - RNA, 19 nt, artificial
  Oligomer
agguguguguuuuucacau

SEQ ID NO: 3294 - RNA, 19 nt, artificial
  Oligomer
gccuuccugaaauaugaga

SEQ ID NO: 3295 - RNA, 19 nt, artificial
  Oligomer
agguuugagcagucacuuu

SEQ ID NO: 3296 - RNA, 19 nt, artificial
  Oligomer
ccgauauuccagucuggau

SEQ ID NO: 3297 - RNA, 19 nt, artificial
  Oligomer
cugcuauagcagaagccga

SEQ ID NO: 3298 - RNA, 19 nt, artificial
  Oligomer
gcuugaauuuuaacagcac

SEQ ID NO: 3299 - RNA, 19 nt, artificial
  Oligomer
ugagcagucacuuuaggau

SEQ ID NO: 3300 - RNA, 19 nt, artificial
  Oligomer
uggacagaaaaucucauaa

SEQ ID NO: 3301 - RNA, 19 nt, artificial
  Oligomer
ggccuauaugaucugccua

SEQ ID NO: 3302 - RNA, 19 nt, artificial
  Oligomer
ccucggacuuuggcaaaga

SEQ ID NO: 3303 - RNA, 19 nt, artificial
  Oligomer
gcccuaaguuugaagggca

SEQ ID NO: 3304 - RNA, 19 nt, artificial
  Oligomer
uggucaugcagcauuaaac

SEQ ID NO: 3305 - RNA, 19 nt, artificial
  Oligomer
cugcucucugcuugaauuu

SEQ ID NO: 3306 - RNA, 19 nt, artificial
  Oligomer
aaaaauccuugggucaaca

SEQ ID NO: 3307 - RNA, 19 nt, artificial
  Oligomer
cagguuugagcagucacuu

SEQ ID NO: 3308 - RNA, 19 nt, artificial
  Oligomer
caugcagcauuaaacuuug

SEQ ID NO: 3309 - RNA, 19 nt, artificial
  Oligomer
gauccuagaaagguucaau

SEQ ID NO: 3310 - RNA, 19 nt, artificial
  Oligomer
cccacagaagauuucuaag

SEQ ID NO: 3311 - RNA, 19 nt, artificial
  Oligomer
gaugugggaugaucgugac

SEQ ID NO: 3312 - RNA, 19 nt, artificial
  Oligomer
gagagucauccucgcaagu

SEQ ID NO: 3313 - RNA, 19 nt, artificial
  Oligomer
cucggacuuuggcaaagag

SEQ ID NO: 3314 - RNA, 19 nt, artificial
  Oligomer
agguuuggugguucagagu

SEQ ID NO: 3315 - RNA, 19 nt, artificial
  Oligomer
gaguuauuuugaagucuuc

SEQ ID NO: 3316 - RNA, 19 nt, artificial
  Oligomer
agcagaagguugugauuac

SEQ ID NO: 3317 - RNA, 19 nt, artificial
  Oligomer
cauccggaggaguuauuuu

SEQ ID NO: 3318 - RNA, 19 nt, artificial
  Oligomer
aggaaggcagaauaaacuu

SEQ ID NO: 3319 - RNA, 19 nt, artificial
  Oligomer
agauuucuaaguaggguga

SEQ ID NO: 3320 - RNA, 19 nt, artificial
  Oligomer
augugacauucaccagcau

SEQ ID NO: 3321 - RNA, 19 nt, artificial
  Oligomer
accuccuuugggagaccaa

SEQ ID NO: 3322 - RNA, 19 nt, artificial
  Oligomer
ugacaaugggaaacugggu

SEQ ID NO: 3323 - RNA, 19 nt, artificial
  Oligomer
cuccauucauauccgagca

SEQ ID NO: 3324 - RNA, 19 nt, artificial
  Oligomer
guucuuggcuaaaucccau

SEQ ID NO: 3325 - RNA, 19 nt, artificial
  Oligomer
ugugcagaccacaaccuca

SEQ ID NO: 3326 - RNA, 19 nt, artificial
  Oligomer
guacaaauuccagugugca

SEQ ID NO: 3327 - RNA, 19 nt, artificial
  Oligomer
ccuuucucagaaaaauaac

SEQ ID NO: 3328 - RNA, 19 nt, artificial
  Oligomer
aaaucuuucuggacagcca

SEQ ID NO: 3329 - RNA, 19 nt, artificial
  Oligomer
guaggcgcccuaaguuuga

SEQ ID NO: 3330 - RNA, 19 nt, artificial
  Oligomer
cuguaggcgcccuaaguuu

SEQ ID NO: 3331 - RNA, 19 nt, artificial
  Oligomer
cugucacuuuugauauggu

SEQ ID NO: 3332 - RNA, 19 nt, artificial
  Oligomer
guuguuaugcacccaucca

SEQ ID NO: 3333 - RNA, 19 nt, artificial
  Oligomer
gugauuuuaucaauuccag

SEQ ID NO: 3334 - RNA, 19 nt, artificial
  Oligomer
gacuguagcaaggcuugau

SEQ ID NO: 3335 - RNA, 19 nt, artificial
  Oligomer
cacuggagugaucaugaca

SEQ ID NO: 3336 - RNA, 19 nt, artificial
  Oligomer
guauacucaccaccuuuuu

SEQ ID NO: 3337 - RNA, 19 nt, artificial
  Oligomer
ucaugacaauagccuugau

SEQ ID NO: 3338 - RNA, 19 nt, artificial
  Oligomer
auggauccuuucucagaaa

SEQ ID NO: 3339 - RNA, 19 nt, artificial
  Oligomer
guaugaaguggcugugcug

SEQ ID NO: 3340 - RNA, 19 nt, artificial
  Oligomer
cuugagcuucagcaacuua

SEQ ID NO: 3341 - RNA, 19 nt, artificial
  Oligomer
aguucuguccagagaagga

SEQ ID NO: 3342 - RNA, 19 nt, artificial
  Oligomer
gucucgucagguuugagca

SEQ ID NO: 3343 - RNA, 19 nt, artificial
  Oligomer
guguuaccaucuccugagu

SEQ ID NO: 3344 - RNA, 19 nt, artificial
  Oligomer
aaggauuuucuucuucacu

SEQ ID NO: 3345 - RNA, 19 nt, artificial
  Oligomer
cgacaguggaguaugugac

SEQ ID NO: 3346 - RNA, 19 nt, artificial
  Oligomer
uauacucaccaccuuuuua

SEQ ID NO: 3347 - RNA, 19 nt, artificial
  Oligomer
agcugguggccuauaugau

SEQ ID NO: 3348 - RNA, 19 nt, artificial
  Oligomer
gacagaaaaucucauaagg

SEQ ID NO: 3349 - RNA, 19 nt, artificial
  Oligomer
accaccuuuuuaucuucua

SEQ ID NO: 3350 - RNA, 19 nt, artificial
  Oligomer
gaaaaauccuugggucaac

SEQ ID NO: 3351 - RNA, 19 nt, artificial
  Oligomer
gguacaaauuccagugugc

SEQ ID NO: 3352 - RNA, 19 nt, artificial
  Oligomer
cuagaagggcuccaaacca

SEQ ID NO: 3353 - RNA, 19 nt, artificial
  Oligomer
guuuuggaauugcagauga

SEQ ID NO: 3354 - RNA, 19 nt, artificial
  Oligomer
caccaauucccaggauuga

SEQ ID NO: 3355 - RNA, 19 nt, artificial
  Oligomer
gggcugaauguuuuccugu

SEQ ID NO: 3356 - RNA, 19 nt, artificial
  Oligomer
cuugcaccggucauucuuu

SEQ ID NO: 3357 - RNA, 19 nt, artificial
  Oligomer
cagccuaucucaugaugag

SEQ ID NO: 3358 - RNA, 19 nt, artificial
  Oligomer
caagguuguuaugcaccca

SEQ ID NO: 3359 - RNA, 19 nt, artificial
  Oligomer
cguuacuugagcuucagca

SEQ ID NO: 3360 - RNA, 19 nt, artificial
  Oligomer
ucagguuugagcagucacu

SEQ ID NO: 3361 - RNA, 19 nt, artificial
  Oligomer
cccugguauucuuuuuuug

SEQ ID NO: 3362 - RNA, 19 nt, artificial
  Oligomer
auaaggacgguaaucugca

SEQ ID NO: 3363 - RNA, 19 nt, artificial
  Oligomer
aaggaaggcagaauaaacu

SEQ ID NO: 3364 - RNA, 19 nt, artificial
  Oligomer
aaaugcugucaccgauauu

SEQ ID NO: 3365 - RNA, 19 nt, artificial
  Oligomer
uugucucuuuguaucuuca

SEQ ID NO: 3366 - RNA, 19 nt, artificial
  Oligomer
ccaugacuguagcaaggcu

SEQ ID NO: 3367 - RNA, 19 nt, artificial
  Oligomer
gggaaacugggugguuaac

SEQ ID NO: 3368 - RNA, 19 nt, artificial
  Oligomer
gauugcauucaacuucguu

SEQ ID NO: 3369 - RNA, 19 nt, artificial
  Oligomer
gugcagagucuuuugagau

SEQ ID NO: 3370 - RNA, 19 nt, artificial
  Oligomer
gaagauuucuaaguagggu

SEQ ID NO: 3371 - RNA, 19 nt, artificial
  Oligomer
ucgugacaggucugaaaca

SEQ ID NO: 3372 - RNA, 19 nt, artificial
  Oligomer
acuuuaggauaagaaugug

SEQ ID NO: 3373 - RNA, 19 nt, artificial
  Oligomer
uuugacugcuauagcagaa

SEQ ID NO: 3374 - RNA, 19 nt, artificial
  Oligomer
guucauccggaggaguuau

SEQ ID NO: 3375 - RNA, 19 nt, artificial
  Oligomer
uucacaucuuaaaggcuca

SEQ ID NO: 3376 - RNA, 19 nt, artificial
  Oligomer
cagccagugaggauguuuu

SEQ ID NO: 3377 - RNA, 19 nt, artificial
  Oligomer
caauucccaggauugaagu

SEQ ID NO: 3378 - RNA, 19 nt, artificial
  Oligomer
aaagcaauuggaucacaac

SEQ ID NO: 3379 - RNA, 19 nt, artificial
  Oligomer
ugaaguucuuaaaguucug

SEQ ID NO: 3380 - RNA, 19 nt, artificial
  Oligomer
ggacuuuggcaaagagccu

SEQ ID NO: 3381 - RNA, 19 nt, artificial
  Oligomer
ggucucacuggagugauca

SEQ ID NO: 3382 - RNA, 19 nt, artificial
  Oligomer
cuuugacaaggccacugac

SEQ ID NO: 3383 - RNA, 19 nt, artificial
  Oligomer
caagugugcagagucuuuu

SEQ ID NO: 3384 - RNA, 19 nt, artificial
  Oligomer
uugugauuaccaagguugu

SEQ ID NO: 3385 - RNA, 19 nt, artificial
  Oligomer
ucacuuuaggauaagaaug

SEQ ID NO: 3386 - RNA, 19 nt, artificial
  Oligomer
cagcaacuuaagaacuucu

SEQ ID NO: 3387 - RNA, 19 nt, artificial
  Oligomer
cucacuggagugaucauga

SEQ ID NO: 3388 - RNA, 19 nt, artificial
  Oligomer
uccagagaaggaaggcaga

SEQ ID NO: 3389 - RNA, 19 nt, artificial
  Oligomer
guggcuucagcauggaagu

SEQ ID NO: 3390 - RNA, 19 nt, artificial
  Oligomer
auugcauucaacuucguua

SEQ ID NO: 3391 - RNA, 19 nt, artificial
  Oligomer
gguuuggugguucagaguu

SEQ ID NO: 3392 - RNA, 19 nt, artificial
  Oligomer
caacuucguuacuugagcu

SEQ ID NO: 3393 - RNA, 19 nt, artificial
  Oligomer
cagcauugcuggucucacu

SEQ ID NO: 3394 - RNA, 19 nt, artificial
  Oligomer
ugaguuuucuacaauagcu

SEQ ID NO: 3395 - RNA, 19 nt, artificial
  Oligomer
aauccaucugguacaaauu

SEQ ID NO: 3396 - RNA, 19 nt, artificial
  Oligomer
ggccgacaaauacuacuac

SEQ ID NO: 3397 - RNA, 19 nt, artificial
  Oligomer
cugaaguucuuaaaguucu

SEQ ID NO: 3398 - RNA, 19 nt, artificial
  Oligomer
aguucuuaaaguucugaag

SEQ ID NO: 3399 - RNA, 19 nt, artificial
  Oligomer
cuacugaguucauccggag

SEQ ID NO: 3400 - RNA, 19 nt, artificial
  Oligomer
ccuguuuguggaugccuuc

SEQ ID NO: 3401 - RNA, 19 nt, artificial
  Oligomer
aaguuuuggaauugcagau

SEQ ID NO: 3402 - RNA, 19 nt, artificial
  Oligomer
accaauucccaggauugaa

SEQ ID NO: 3403 - RNA, 19 nt, artificial
  Oligomer
acuuggucucgucagguuu

SEQ ID NO: 3404 - RNA, 19 nt, artificial
  Oligomer
cucauuuugcagccgcaca

SEQ ID NO: 3405 - RNA, 19 nt, artificial
  Oligomer
ugggacaaugaguuuucua

SEQ ID NO: 3406 - RNA, 19 nt, artificial
  Oligomer
ucuucuauauccuuggcuu

SEQ ID NO: 3407 - RNA, 19 nt, artificial
  Oligomer
auuuuaacagcacgcugau

SEQ ID NO: 3408 - RNA, 19 nt, artificial
  Oligomer
uuuaccgcucccagcagaa

SEQ ID NO: 3409 - RNA, 19 nt, artificial
  Oligomer
ugaauguuuuccuguuugu

SEQ ID NO: 3410 - RNA, 19 nt, artificial
  Oligomer
uaaacuuauucauucccag

SEQ ID NO: 3411 - RNA, 19 nt, artificial
  Oligomer
ugauugcauucaacuucgu

SEQ ID NO: 3412 - RNA, 19 nt, artificial
  Oligomer
ucccaggugauuuuaucaa

SEQ ID NO: 3413 - RNA, 19 nt, artificial
  Oligomer
agucuguagugggaguuuu

SEQ ID NO: 3414 - RNA, 19 nt, artificial
  Oligomer
ugcugguuggagcaggaau

SEQ ID NO: 3415 - RNA, 19 nt, artificial
  Oligomer
cuggacagaaaaucucaua

SEQ ID NO: 3416 - RNA, 19 nt, artificial
  Oligomer
acaaauuccagugugcaga

SEQ ID NO: 3417 - RNA, 19 nt, artificial
  Oligomer
ccaaugugggacaaugagu

SEQ ID NO: 3418 - RNA, 19 nt, artificial
  Oligomer
uugacucccugguauucuu

SEQ ID NO: 3419 - RNA, 19 nt, artificial
  Oligomer
ugacuguagcaaggcuuga

SEQ ID NO: 3420 - RNA, 19 nt, artificial
  Oligomer
gaaguucuuaaaguucuga

SEQ ID NO: 3421 - RNA, 19 nt, artificial
  Oligomer
gcgcuggacaaauguucca

SEQ ID NO: 3422 - RNA, 19 nt, artificial
  Oligomer
cuucugaaguucuuaaagu

SEQ ID NO: 3423 - RNA, 19 nt, artificial
  Oligomer
ucucucuccuggaauggca

SEQ ID NO: 3424 - RNA, 19 nt, artificial
  Oligomer
cagaguuauacaacuaauc

SEQ ID NO: 3425 - RNA, 19 nt, artificial
  Oligomer
cuccuggaauggcauccuu

SEQ ID NO: 3426 - RNA, 19 nt, artificial
  Oligomer
gguuguuugguuagggcug

SEQ ID NO: 3427 - RNA, 19 nt, artificial
  Oligomer
uccagugugcagaccacaa

SEQ ID NO: 3428 - RNA, 19 nt, artificial
  Oligomer
agaacuucugaaguucuua

SEQ ID NO: 3429 - RNA, 19 nt, artificial
  Oligomer
ucucuuuguaucuucagua

SEQ ID NO: 3430 - RNA, 19 nt, artificial
  Oligomer
cugacaucgugacaggucu

SEQ ID NO: 3431 - RNA, 19 nt, artificial
  Oligomer
uugccuagaagggcuccaa

SEQ ID NO: 3432 - RNA, 19 nt, artificial
  Oligomer
gagaccaaugugggacaau

SEQ ID NO: 3433 - RNA, 19 nt, artificial
  Oligomer
ccuuuuacuuugaccucug

SEQ ID NO: 3434 - RNA, 19 nt, artificial
  Oligomer
auuuugaagucuucuggua

SEQ ID NO: 3435 - RNA, 19 nt, artificial
  Oligomer
gauccuugcaccggucauu

SEQ ID NO: 3436 - RNA, 19 nt, artificial
  Oligomer
gauguuuuccaguaugaag

SEQ ID NO: 3437 - RNA, 19 nt, artificial
  Oligomer
uaaucuuuugucccuccca

SEQ ID NO: 3438 - RNA, 19 nt, artificial
  Oligomer
agugugcagagucuuuuga

SEQ ID NO: 3439 - RNA, 19 nt, artificial
  Oligomer
guuugagcagucacuuuag

SEQ ID NO: 3440 - RNA, 19 nt, artificial
  Oligomer
aacuuugacugcuauagca

SEQ ID NO: 3441 - RNA, 19 nt, artificial
  Oligomer
uaugagaaggccgacaaau

SEQ ID NO: 3442 - RNA, 19 nt, artificial
  Oligomer
aucccauccagucccgaaa

SEQ ID NO: 3443 - RNA, 19 nt, artificial
  Oligomer
uacagcuauucacaucauu

SEQ ID NO: 3444 - RNA, 19 nt, artificial
  Oligomer
caccaacaguguacauguu

SEQ ID NO: 3445 - RNA, 19 nt, artificial
  Oligomer
cugcauuuugucucuuugu

SEQ ID NO: 3446 - RNA, 19 nt, artificial
  Oligomer
ucaauuccaguguuaccau

SEQ ID NO: 3447 - RNA, 19 nt, artificial
  Oligomer
gguaaucugcauuuugucu

SEQ ID NO: 3448 - RNA, 19 nt, artificial
  Oligomer
uucuuauguggcccucgga

SEQ ID NO: 3449 - RNA, 19 nt, artificial
  Oligomer
guuuguggaugccuuccug

SEQ ID NO: 3450 - RNA, 19 nt, artificial
  Oligomer
ccaggauugaaguggaugg

SEQ ID NO: 3451 - RNA, 19 nt, artificial
  Oligomer
cagagucuuuugagaugug

SEQ ID NO: 3452 - RNA, 19 nt, artificial
  Oligomer
uacuuugaccucugcucca

SEQ ID NO: 3453 - RNA, 19 nt, artificial
  Oligomer
agggcugaauguuuuccug

SEQ ID NO: 3454 - RNA, 19 nt, artificial
  Oligomer
ccuugcaccggucauucuu

SEQ ID NO: 3455 - RNA, 19 nt, artificial
  Oligomer
cauucucuccagccuaucu

SEQ ID NO: 3456 - RNA, 19 nt, artificial
  Oligomer
uucucuccagccuaucuca

SEQ ID NO: 3457 - RNA, 19 nt, artificial
  Oligomer
ccagugaggauguuuucca

SEQ ID NO: 3458 - RNA, 19 nt, artificial
  Oligomer
guucuguccagagaaggaa

SEQ ID NO: 3459 - RNA, 19 nt, artificial
  Oligomer
aaggcuugauagcagaggu

SEQ ID NO: 3460 - RNA, 19 nt, artificial
  Oligomer
gguuuucaguuuuguuucu

SEQ ID NO: 3461 - RNA, 19 nt, artificial
  Oligomer
ccaucuccugaguuuuggu

SEQ ID NO: 3462 - RNA, 19 nt, artificial
  Oligomer
gugggaguuuucuuaugug

SEQ ID NO: 3463 - RNA, 19 nt, artificial
  Oligomer
gguucaauucuacuucaac

SEQ ID NO: 3464 - RNA, 19 nt, artificial
  Oligomer
uacaacuaaucccagguga

SEQ ID NO: 3465 - RNA, 19 nt, artificial
  Oligomer
acuuugacaaggccacuga

SEQ ID NO: 3466 - RNA, 19 nt, artificial
  Oligomer
guguguguuuuucacaucu

SEQ ID NO: 3467 - RNA, 19 nt, artificial
  Oligomer
augcagcauuaaacuuuga

SEQ ID NO: 3468 - RNA, 19 nt, artificial
  Oligomer
agaggagagcaugaaugag

SEQ ID NO: 3469 - RNA, 19 nt, artificial
  Oligomer
ggaugccuuccugaaauau

SEQ ID NO: 3470 - RNA, 19 nt, artificial
  Oligomer
aaauccuugggucaacauu

SEQ ID NO: 3471 - RNA, 19 nt, artificial
  Oligomer
gacucccugguauucuuuu

SEQ ID NO: 3472 - RNA, 19 nt, artificial
  Oligomer
acaucuuaaaggcucacag

SEQ ID NO: 3473 - RNA, 19 nt, artificial
  Oligomer
cagaaaaucucauaagggc

SEQ ID NO: 3474 - RNA, 19 nt, artificial
  Oligomer
agugggaguuuucuuaugu

SEQ ID NO: 3475 - RNA, 19 nt, artificial
  Oligomer
gugugcagagucuuuugag

SEQ ID NO: 3476 - RNA, 19 nt, artificial
  Oligomer
uccuggaauggcauccuuu

SEQ ID NO: 3477 - RNA, 19 nt, artificial
  Oligomer
gggacaaugaguuuucuac

SEQ ID NO: 3478 - RNA, 19 nt, artificial
  Oligomer
gucuguagugggaguuuuc

SEQ ID NO: 3479 - RNA, 19 nt, artificial
  Oligomer
gugggacaaugaguuuucu

SEQ ID NO: 3480 - RNA, 19 nt, artificial
  Oligomer
gaaugagagucauccucgc

SEQ ID NO: 3481 - RNA, 19 nt, artificial
  Oligomer
gacgguaaucugcauuuug

SEQ ID NO: 3482 - RNA, 19 nt, artificial
  Oligomer
acuggacagaaaaucucau

SEQ ID NO: 3483 - RNA, 19 nt, artificial
  Oligomer
ccgacaaauacuacuacac

SEQ ID NO: 3484 - RNA, 19 nt, artificial
  Oligomer
ugguaacuucagcuacuga

SEQ ID NO: 3485 - RNA, 19 nt, artificial
  Oligomer
caggauugaaguggauggu

SEQ ID NO: 3486 - RNA, 19 nt, artificial
  Oligomer
gcaauuggaucacaaccuc

SEQ ID NO: 3487 - RNA, 19 nt, artificial
  Oligomer
gcugaaucuucccuguugc

SEQ ID NO: 3488 - RNA, 19 nt, artificial
  Oligomer
gcuugauagcagagguuug

SEQ ID NO: 3489 - RNA, 19 nt, artificial
  Oligomer
uguaaaucuuucuggacag

SEQ ID NO: 3490 - RNA, 19 nt, artificial
  Oligomer
cugugugucgcaaucugcu

SEQ ID NO: 3491 - RNA, 19 nt, artificial
  Oligomer
gcagagucuuuugagaugu

SEQ ID NO: 3492 - RNA, 19 nt, artificial
  Oligomer
uaggcgcccuaaguuugaa

SEQ ID NO: 3493 - RNA, 19 nt, artificial
  Oligomer
gacaaauguuccauuccug

SEQ ID NO: 3494 - RNA, 19 nt, artificial
  Oligomer
uuugguuagggcugaaugu

SEQ ID NO: 3495 - RNA, 19 nt, artificial
  Oligomer
aguucugaaguucuuaaag

SEQ ID NO: 3496 - RNA, 19 nt, artificial
  Oligomer
ggcuaaaucccauccaguc

SEQ ID NO: 3497 - RNA, 19 nt, artificial
  Oligomer
gcuuucgaacaacaauauu

SEQ ID NO: 3498 - RNA, 19 nt, artificial
  Oligomer
gaggauguuuuccaguaug

SEQ ID NO: 3499 - RNA, 19 nt, artificial
  Oligomer
ugcuugaauuuuaacagca

SEQ ID NO: 3500 - RNA, 19 nt, artificial
  Oligomer
agccuugacucccugguau

SEQ ID NO: 3501 - RNA, 19 nt, artificial
  Oligomer
ugcaccggucauucuuuau

SEQ ID NO: 3502 - RNA, 19 nt, artificial
  Oligomer
cagaagguugugauuacca

SEQ ID NO: 3503 - RNA, 19 nt, artificial
  Oligomer
agaaaaucucauaagggcu

SEQ ID NO: 3504 - RNA, 19 nt, artificial
  Oligomer
caugaaugagagucauccu

SEQ ID NO: 3505 - RNA, 19 nt, artificial
  Oligomer
agcuauucacaucauugca

SEQ ID NO: 3506 - RNA, 19 nt, artificial
  Oligomer
uuaaaauucaagcagagag

SEQ ID NO: 3507 - RNA, 19 nt, artificial
  Oligomer
uuuuguuuugagguugugg

SEQ ID NO: 3508 - RNA, 19 nt, artificial
  Oligomer
uucaaaauaacuccuccgg

SEQ ID NO: 3509 - RNA, 19 nt, artificial
  Oligomer
uuacaaaccaaaacucagg

SEQ ID NO: 3510 - RNA, 19 nt, artificial
  Oligomer
auucuuauccuaaagugac

SEQ ID NO: 3511 - RNA, 19 nt, artificial
  Oligomer
uuuguuuugagguuguggu

SEQ ID NO: 3512 - RNA, 19 nt, artificial
  Oligomer
uguauaacucugaaccacc

SEQ ID NO: 3513 - RNA, 19 nt, artificial
  Oligomer
uuauucugccuuccuucuc

SEQ ID NO: 3514 - RNA, 19 nt, artificial
  Oligomer
uuuggaugggugcauaaca

SEQ ID NO: 3515 - RNA, 19 nt, artificial
  Oligomer
uuaaccacccaguuuccca

SEQ ID NO: 3516 - RNA, 19 nt, artificial
  Oligomer
uuucucaucaugagauagg

SEQ ID NO: 3517 - RNA, 19 nt, artificial
  Oligomer
uuuuucugagaaaggaucc

SEQ ID NO: 3518 - RNA, 19 nt, artificial
  Oligomer
uuugucggccuucucauau

SEQ ID NO: 3519 - RNA, 19 nt, artificial
  Oligomer
uguagaaaacucauugucc

SEQ ID NO: 3520 - RNA, 19 nt, artificial
  Oligomer
uuuauucugccuuccuucu

SEQ ID NO: 3521 - RNA, 19 nt, artificial
  Oligomer
uuucuguuucagaccuguc

SEQ ID NO: 3522 - RNA, 19 nt, artificial
  Oligomer
uccacuuccaagacucagg

SEQ ID NO: 3523 - RNA, 19 nt, artificial
  Oligomer
uucuuauccuaaagugacu

SEQ ID NO: 3524 - RNA, 19 nt, artificial
  Oligomer
uccaauugcuuucucagug

SEQ ID NO: 3525 - RNA, 19 nt, artificial
  Oligomer
uauuguuguucgaaagccc

SEQ ID NO: 3526 - RNA, 19 nt, artificial
  Oligomer
uuucccauugucaagaggu

SEQ ID NO: 3527 - RNA, 19 nt, artificial
  Oligomer
ucaugcucuccucuguuug

SEQ ID NO: 3528 - RNA, 19 nt, artificial
  Oligomer
uuugagguuguggucugca

SEQ ID NO: 3529 - RNA, 19 nt, artificial
  Oligomer
uucagaaguucuuaaguug

SEQ ID NO: 3530 - RNA, 19 nt, artificial
  Oligomer
ugggaauuggugaauauug

SEQ ID NO: 3531 - RNA, 19 nt, artificial
  Oligomer
auugucaugaucacuccag

SEQ ID NO: 3532 - RNA, 19 nt, artificial
  Oligomer
augagaaucaaggcuauug

SEQ ID NO: 3533 - RNA, 19 nt, artificial
  Oligomer
aguuguauaacucugaacc

SEQ ID NO: 3534 - RNA, 19 nt, artificial
  Oligomer
uauucugccuuccuucucu

SEQ ID NO: 3535 - RNA, 19 nt, artificial
  Oligomer
auugauaaaaucaccuggg

SEQ ID NO: 3536 - RNA, 19 nt, artificial
  Oligomer
ucagaaguucuuaaguugc

SEQ ID NO: 3537 - RNA, 19 nt, artificial
  Oligomer
ugcugcucggauaugaaug

SEQ ID NO: 3538 - RNA, 19 nt, artificial
  Oligomer
ucugugagccuuuaagaug

SEQ ID NO: 3539 - RNA, 19 nt, artificial
  Oligomer
ucaggagaugguaacacug

SEQ ID NO: 3540 - RNA, 19 nt, artificial
  Oligomer
ucaagugaagaagaaaauc

SEQ ID NO: 3541 - RNA, 19 nt, artificial
  Oligomer
ugaaaaacacacaccuacc

SEQ ID NO: 3542 - RNA, 19 nt, artificial
  Oligomer
uccggaugaacucaguagc

SEQ ID NO: 3543 - RNA, 19 nt, artificial
  Oligomer
uucucuggacagaacugug

SEQ ID NO: 3544 - RNA, 19 nt, artificial
  Oligomer
auggauuucaagauagaag

SEQ ID NO: 3545 - RNA, 19 nt, artificial
  Oligomer
uucugagaaaggauccaug

SEQ ID NO: 3546 - RNA, 19 nt, artificial
  Oligomer
augggcuuuaagaacuuca

SEQ ID NO: 3547 - RNA, 19 nt, artificial
  Oligomer
uccagugagaccagcaaug

SEQ ID NO: 3548 - RNA, 19 nt, artificial
  Oligomer
ucaagauagaagcaaaggg

SEQ ID NO: 3549 - RNA, 19 nt, artificial
  Oligomer
uuguggaaggugagguugu

SEQ ID NO: 3550 - RNA, 19 nt, artificial
  Oligomer
uuucaggaaggcauccaca

SEQ ID NO: 3551 - RNA, 19 nt, artificial
  Oligomer
uuucaagauagaagcaaag

SEQ ID NO: 3552 - RNA, 19 nt, artificial
  Oligomer
uaaguuuauucugccuucc

SEQ ID NO: 3553 - RNA, 19 nt, artificial
  Oligomer
caagugaagaagaaaaucc

SEQ ID NO: 3554 - RNA, 19 nt, artificial
  Oligomer
ugucacauacuccacuguc

SEQ ID NO: 3555 - RNA, 19 nt, artificial
  Oligomer
uuuaaaaagucacccuacu

SEQ ID NO: 3556 - RNA, 19 nt, artificial
  Oligomer
uccaggagagagauugagg

SEQ ID NO: 3557 - RNA, 19 nt, artificial
  Oligomer
ugaagcucaaguaacgaag

SEQ ID NO: 3558 - RNA, 19 nt, artificial
  Oligomer
uuacugaagauacaaagag

SEQ ID NO: 3559 - RNA, 19 nt, artificial
  Oligomer
uaggcaacagggaagauuc

SEQ ID NO: 3560 - RNA, 19 nt, artificial
  Oligomer
aauugauaaaaucaccugg

SEQ ID NO: 3561 - RNA, 19 nt, artificial
  Oligomer
ucagcaauccggauucugg

SEQ ID NO: 3562 - RNA, 19 nt, artificial
  Oligomer
uucuguuucagaccuguca

SEQ ID NO: 3563 - RNA, 19 nt, artificial
  Oligomer
uucaagauagaagcaaagg

SEQ ID NO: 3564 - RNA, 19 nt, artificial
  Oligomer
uuuugagguuguggucugc

SEQ ID NO: 3565 - RNA, 19 nt, artificial
  Oligomer
ucucaaaagacucugcaca

SEQ ID NO: 3566 - RNA, 19 nt, artificial
  Oligomer
ucuuauccuaaagugacug

SEQ ID NO: 3567 - RNA, 19 nt, artificial
  Oligomer
uuaaaaagucacccuacuu

SEQ ID NO: 3568 - RNA, 19 nt, artificial
  Oligomer
uaaacauguacacuguugg

SEQ ID NO: 3569 - RNA, 19 nt, artificial
  Oligomer
ugaaguuaccaugagaauc

SEQ ID NO: 3570 - RNA, 19 nt, artificial
  Oligomer
uagcuauuguagaaaacuc

SEQ ID NO: 3571 - RNA, 19 nt, artificial
  Oligomer
auuacaaaccaaaacucag

SEQ ID NO: 3572 - RNA, 19 nt, artificial
  Oligomer
uuaaugcugcaugaccaac

SEQ ID NO: 3573 - RNA, 19 nt, artificial
  Oligomer
uuguuuugagguugugguc

SEQ ID NO: 3574 - RNA, 19 nt, artificial
  Oligomer
uugaaguagaauugaaccu

SEQ ID NO: 3575 - RNA, 19 nt, artificial
  Oligomer
auacaaagagacaaaaugc

SEQ ID NO: 3576 - RNA, 19 nt, artificial
  Oligomer
auagaagauaaaaaggugg

SEQ ID NO: 3577 - RNA, 19 nt, artificial
  Oligomer
uguuaaaauucaagcagag

SEQ ID NO: 3578 - RNA, 19 nt, artificial
  Oligomer
guuuauucugccuuccuuc

SEQ ID NO: 3579 - RNA, 19 nt, artificial
  Oligomer
uggaaggugagguugugau

SEQ ID NO: 3580 - RNA, 19 nt, artificial
  Oligomer
ucaaaaaaagaauaccagg

SEQ ID NO: 3581 - RNA, 19 nt, artificial
  Oligomer
aacaggaaaacauucagcc

SEQ ID NO: 3582 - RNA, 19 nt, artificial
  Oligomer
uaagaugugaaaaacacac

SEQ ID NO: 3583 - RNA, 19 nt, artificial
  Oligomer
uucauacuggaaaacaucc

SEQ ID NO: 3584 - RNA, 19 nt, artificial
  Oligomer
uuguauaacucugaaccac

SEQ ID NO: 3585 - RNA, 19 nt, artificial
  Oligomer
uuaccguccuuauuccuau

SEQ ID NO: 3586 - RNA, 19 nt, artificial
  Oligomer
auucaagcagagagcagac

SEQ ID NO: 3587 - RNA, 19 nt, artificial
  Oligomer
gaaggugagguugugaucc

SEQ ID NO: 3588 - RNA, 19 nt, artificial
  Oligomer
aaaaggaugccauuccagg

SEQ ID NO: 3589 - RNA, 19 nt, artificial
  Oligomer
aagugaagaagaaaauccu

SEQ ID NO: 3590 - RNA, 19 nt, artificial
  Oligomer
aucggugacagcauuugcg

SEQ ID NO: 3591 - RNA, 19 nt, artificial
  Oligomer
auaaguuuauucugccuuc

SEQ ID NO: 3592 - RNA, 19 nt, artificial
  Oligomer
uucucauauuucaggaagg

SEQ ID NO: 3593 - RNA, 19 nt, artificial
  Oligomer
cuuucuaggauccagacug

SEQ ID NO: 3594 - RNA, 19 nt, artificial
  Oligomer
ugggauuuagccaagaacc

SEQ ID NO: 3595 - RNA, 19 nt, artificial
  Oligomer
uuuucuguuucagaccugu

SEQ ID NO: 3596 - RNA, 19 nt, artificial
  Oligomer
augccgugaaucccuaagc

SEQ ID NO: 3597 - RNA, 19 nt, artificial
  Oligomer
aguuuaaugcugcaugacc

SEQ ID NO: 3598 - RNA, 19 nt, artificial
  Oligomer
uacuuagaaaucuucugug

SEQ ID NO: 3599 - RNA, 19 nt, artificial
  Oligomer
ucacgaucaucccacaucu

SEQ ID NO: 3600 - RNA, 19 nt, artificial
  Oligomer
auuuuucugagaaaggauc

SEQ ID NO: 3601 - RNA, 19 nt, artificial
  Oligomer
uucgaaagcccuuaugaga

SEQ ID NO: 3602 - RNA, 19 nt, artificial
  Oligomer
aagacuucaaaauaacucc

SEQ ID NO: 3603 - RNA, 19 nt, artificial
  Oligomer
ugucaaaguuuaaugcugc

SEQ ID NO: 3604 - RNA, 19 nt, artificial
  Oligomer
agauuuucuguccaguccc

SEQ ID NO: 3605 - RNA, 19 nt, artificial
  Oligomer
auuaccguccuuauuccua

SEQ ID NO: 3606 - RNA, 19 nt, artificial
  Oligomer
ucugcuaucaagccuugcu

SEQ ID NO: 3607 - RNA, 19 nt, artificial
  Oligomer
ugguuaaccacccaguuuc

SEQ ID NO: 3608 - RNA, 19 nt, artificial
  Oligomer
uuguuguucgaaagcccuu

SEQ ID NO: 3609 - RNA, 19 nt, artificial
  Oligomer
auuuaaaaagucacccuac

SEQ ID NO: 3610 - RNA, 19 nt, artificial
  Oligomer
uguaggcagaucauauagg

SEQ ID NO: 3611 - RNA, 19 nt, artificial
  Oligomer
cuggaaaacauccucacug

SEQ ID NO: 3612 - RNA, 19 nt, artificial
  Oligomer
uggaauugauaaaaucacc

SEQ ID NO: 3613 - RNA, 19 nt, artificial
  Oligomer
uugucaugaucacuccagu

SEQ ID NO: 3614 - RNA, 19 nt, artificial
  Oligomer
gcuauugucaugaucacuc

SEQ ID NO: 3615 - RNA, 19 nt, artificial
  Oligomer
uucugccuuccuucucugg

SEQ ID NO: 3616 - RNA, 19 nt, artificial
  Oligomer
uagaauugaaccuuucuag

SEQ ID NO: 3617 - RNA, 19 nt, artificial
  Oligomer
uuuggagcccuucuaggca

SEQ ID NO: 3618 - RNA, 19 nt, artificial
  Oligomer
acucccacuacagacuugg

SEQ ID NO: 3619 - RNA, 19 nt, artificial
  Oligomer
cuucaaaauaacuccuccg

SEQ ID NO: 3620 - RNA, 19 nt, artificial
  Oligomer
uaaaaccggaggauccuuu

SEQ ID NO: 3621 - RNA, 19 nt, artificial
  Oligomer
auccacuuccaagacucag

SEQ ID NO: 3622 - RNA, 19 nt, artificial
  Oligomer
uguuuugagguuguggucu

SEQ ID NO: 3623 - RNA, 19 nt, artificial
  Oligomer
cucugaaccaccaaaccuc

SEQ ID NO: 3624 - RNA, 19 nt, artificial
  Oligomer
uccuuauuccuauaacuca

SEQ ID NO: 3625 - RNA, 19 nt, artificial
  Oligomer
cucucauucaugcucuccu

SEQ ID NO: 3626 - RNA, 19 nt, artificial
  Oligomer
auugcgacacacaggaagc

SEQ ID NO: 3627 - RNA, 19 nt, artificial
  Oligomer
acauucuuauccuaaagug

SEQ ID NO: 3628 - RNA, 19 nt, artificial
  Oligomer
gacaauuccaccaaugccg

SEQ ID NO: 3629 - RNA, 19 nt, artificial
  Oligomer
ugcucuccucuguuugacc

SEQ ID NO: 3630 - RNA, 19 nt, artificial
  Oligomer
uucagcaauccggauucug

SEQ ID NO: 3631 - RNA, 19 nt, artificial
  Oligomer
uccagaaagauuuacaguu

SEQ ID NO: 3632 - RNA, 19 nt, artificial
  Oligomer
uugcuuucucagugugcgg

SEQ ID NO: 3633 - RNA, 19 nt, artificial
  Oligomer
uaagaaaacucccacuaca

SEQ ID NO: 3634 - RNA, 19 nt, artificial
  Oligomer
ucccaaaggagguuuucug

SEQ ID NO: 3635 - RNA, 19 nt, artificial
  Oligomer
ucaaaguuaaacaggugug

SEQ ID NO: 3636 - RNA, 19 nt, artificial
  Oligomer
ugcaauuccaaaacuuugg

SEQ ID NO: 3637 - RNA, 19 nt, artificial
  Oligomer
uuguucaucugcaauucca

SEQ ID NO: 3638 - RNA, 19 nt, artificial
  Oligomer
uaaaaggaugccauuccag

SEQ ID NO: 3639 - RNA, 19 nt, artificial
  Oligomer
ugugcaaugaugugaauag

SEQ ID NO: 3640 - RNA, 19 nt, artificial
  Oligomer
ugacugcucaaaccugacg

SEQ ID NO: 3641 - RNA, 19 nt, artificial
  Oligomer
augcccuucaaacuuaggg

SEQ ID NO: 3642 - RNA, 19 nt, artificial
  Oligomer
aaucacaaccuucugcugg

SEQ ID NO: 3643 - RNA, 19 nt, artificial
  Oligomer
ucaucaugagauaggcugg

SEQ ID NO: 3644 - RNA, 19 nt, artificial
  Oligomer
uggaauaucggugacagca

SEQ ID NO: 3645 - RNA, 19 nt, artificial
  Oligomer
uaacuccuccggaugaacu

SEQ ID NO: 3646 - RNA, 19 nt, artificial
  Oligomer
ucaaaagugacaguaaaca

SEQ ID NO: 3647 - RNA, 19 nt, artificial
  Oligomer
auucugccuuccuucucug

SEQ ID NO: 3648 - RNA, 19 nt, artificial
  Oligomer
aauagcuguauguaggcag

SEQ ID NO: 3649 - RNA, 19 nt, artificial
  Oligomer
auauuguuguucgaaagcc

SEQ ID NO: 3650 - RNA, 19 nt, artificial
  Oligomer
uccaugggcuuuaagaacu

SEQ ID NO: 3651 - RNA, 19 nt, artificial
  Oligomer
auucaugcucuccucuguu

SEQ ID NO: 3652 - RNA, 19 nt, artificial
  Oligomer
uccaccaaugccgugaauc

SEQ ID NO: 3653 - RNA, 19 nt, artificial
  Oligomer
ucacauacuccacugucgu

SEQ ID NO: 3654 - RNA, 19 nt, artificial
  Oligomer
uggaauuuguaccagaugg

SEQ ID NO: 3655 - RNA, 19 nt, artificial
  Oligomer
uucaucugcaauuccaaaa

SEQ ID NO: 3656 - RNA, 19 nt, artificial
  Oligomer
auugcuuucucagugugcg

SEQ ID NO: 3657 - RNA, 19 nt, artificial
  Oligomer
uuuuuguuuugagguugug

SEQ ID NO: 3658 - RNA, 19 nt, artificial
  Oligomer
ugagguugugauccaauug

SEQ ID NO: 3659 - RNA, 19 nt, artificial
  Oligomer
ucugaaccaccaaaccucu

SEQ ID NO: 3660 - RNA, 19 nt, artificial
  Oligomer
uaagccaaggauauagaag

SEQ ID NO: 3661 - RNA, 19 nt, artificial
  Oligomer
uugucaaaguuuaaugcug

SEQ ID NO: 3662 - RNA, 19 nt, artificial
  Oligomer
ugacucucauucaugcucu

SEQ ID NO: 3663 - RNA, 19 nt, artificial
  Oligomer
cugcaauuccaaaacuuug

SEQ ID NO: 3664 - RNA, 19 nt, artificial
  Oligomer
uggugaaugucacauacuc

SEQ ID NO: 3665 - RNA, 19 nt, artificial
  Oligomer
uucagaccugucacgaugu

SEQ ID NO: 3666 - RNA, 19 nt, artificial
  Oligomer
uaagaccauaucaaaagug

SEQ ID NO: 3667 - RNA, 19 nt, artificial
  Oligomer
cuugguaaucacaaccuuc

SEQ ID NO: 3668 - RNA, 19 nt, artificial
  Oligomer
guuaaaauucaagcagaga

SEQ ID NO: 3669 - RNA, 19 nt, artificial
  Oligomer
acucucauucaugcucucc

SEQ ID NO: 3670 - RNA, 19 nt, artificial
  Oligomer
uaucaagccuugcuacagu

SEQ ID NO: 3671 - RNA, 19 nt, artificial
  Oligomer
uuuucucaucaugagauag

SEQ ID NO: 3672 - RNA, 19 nt, artificial
  Oligomer
ucucuggacagaacugugc

SEQ ID NO: 3673 - RNA, 19 nt, artificial
  Oligomer
ugggagguagcuauuguag

SEQ ID NO: 3674 - RNA, 19 nt, artificial
  Oligomer
aaaauucaagcagagagca

SEQ ID NO: 3675 - RNA, 19 nt, artificial
  Oligomer
uauugucaugaucacucca

SEQ ID NO: 3676 - RNA, 19 nt, artificial
  Oligomer
uucccauugucaagaggug

SEQ ID NO: 3677 - RNA, 19 nt, artificial
  Oligomer
uuggaugggugcauaacaa

SEQ ID NO: 3678 - RNA, 19 nt, artificial
  Oligomer
uggagaagaaaucuuccuc

SEQ ID NO: 3679 - RNA, 19 nt, artificial
  Oligomer
auacuggaaaacauccuca

SEQ ID NO: 3680 - RNA, 19 nt, artificial
  Oligomer
uuaagaacuucagaaguuc

SEQ ID NO: 3681 - RNA, 19 nt, artificial
  Oligomer
aaugucacauacuccacug

SEQ ID NO: 3682 - RNA, 19 nt, artificial
  Oligomer
ucuguuucagaccugucac

SEQ ID NO: 3683 - RNA, 19 nt, artificial
  Oligomer
uugcugaagcucaaguaac

SEQ ID NO: 3684 - RNA, 19 nt, artificial
  Oligomer
uugagguuguggucugcac

SEQ ID NO: 3685 - RNA, 19 nt, artificial
  Oligomer
auuggucucccaaaggagg

SEQ ID NO: 3686 - RNA, 19 nt, artificial
  Oligomer
uaguuguauaacucugaac

SEQ ID NO: 3687 - RNA, 19 nt, artificial
  Oligomer
uguccagaaagauuuacag

SEQ ID NO: 3688 - RNA, 19 nt, artificial
  Oligomer
aggaauggaacauuugucc

SEQ ID NO: 3689 - RNA, 19 nt, artificial
  Oligomer
aucaccugggauuaguugu

SEQ ID NO: 3690 - RNA, 19 nt, artificial
  Oligomer
uugaaccuuucuaggaucc

SEQ ID NO: 3691 - RNA, 19 nt, artificial
  Oligomer
acaaccagaaacaaaacug

SEQ ID NO: 3692 - RNA, 19 nt, artificial
  Oligomer
ucugcaauuccaaaacuuu

SEQ ID NO: 3693 - RNA, 19 nt, artificial
  Oligomer
acuucaaaauaacuccucc

SEQ ID NO: 3694 - RNA, 19 nt, artificial
  Oligomer
ugggcuuuaagaacuucag

SEQ ID NO: 3695 - RNA, 19 nt, artificial
  Oligomer
uugacccaaggauuuuucu

SEQ ID NO: 3696 - RNA, 19 nt, artificial
  Oligomer
ugcaaaaugagcaggugcc

SEQ ID NO: 3697 - RNA, 19 nt, artificial
  Oligomer
auaacaaccuugguaauca

SEQ ID NO: 3698 - RNA, 19 nt, artificial
  Oligomer
ugaguauaccagaagacuu

SEQ ID NO: 3699 - RNA, 19 nt, artificial
  Oligomer
ucggccuucucauauuuca

SEQ ID NO: 3700 - RNA, 19 nt, artificial
  Oligomer
accaaugccgugaaucccu

SEQ ID NO: 3701 - RNA, 19 nt, artificial
  Oligomer
aaccagugguuaaccaccc

SEQ ID NO: 3702 - RNA, 19 nt, artificial
  Oligomer
uucaggaauggaacauuug

SEQ ID NO: 3703 - RNA, 19 nt, artificial
  Oligomer
guuaccaugagaaucaagg

SEQ ID NO: 3704 - RNA, 19 nt, artificial
  Oligomer
aaccuugguaaucacaacc

SEQ ID NO: 3705 - RNA, 19 nt, artificial
  Oligomer
ugagauuuucuguccaguc

SEQ ID NO: 3706 - RNA, 19 nt, artificial
  Oligomer
uggugaauauuguuguucg

SEQ ID NO: 3707 - RNA, 19 nt, artificial
  Oligomer
aaugccgugaaucccuaag

SEQ ID NO: 3708 - RNA, 19 nt, artificial
  Oligomer
aauaccagggagucaaggc

SEQ ID NO: 3709 - RNA, 19 nt, artificial
  Oligomer
augacucucauucaugcuc

SEQ ID NO: 3710 - RNA, 19 nt, artificial
  Oligomer
ugaaaaccagugguuaacc

SEQ ID NO: 3711 - RNA, 19 nt, artificial
  Oligomer
auguaggcagaucauauag

SEQ ID NO: 3712 - RNA, 19 nt, artificial
  Oligomer
ucaaaauaacuccuccgga

SEQ ID NO: 3713 - RNA, 19 nt, artificial
  Oligomer
aggcacauucuuauccuaa

SEQ ID NO: 3714 - RNA, 19 nt, artificial
  Oligomer
acuguugguguuauauggg

SEQ ID NO: 3715 - RNA, 19 nt, artificial
  Oligomer
aaaccagugguuaaccacc

SEQ ID NO: 3716 - RNA, 19 nt, artificial
  Oligomer
uaaaaagucacccuacuua

SEQ ID NO: 3717 - RNA, 19 nt, artificial
  Oligomer
uaggcuggagagaauggag

SEQ ID NO: 3718 - RNA, 19 nt, artificial
  Oligomer
aauuccaaaacuuuggaug

SEQ ID NO: 3719 - RNA, 19 nt, artificial
  Oligomer
ucugcuauagcagucaaag

SEQ ID NO: 3720 - RNA, 19 nt, artificial
  Oligomer
aauuccugcuccaaccagc

SEQ ID NO: 3721 - RNA, 19 nt, artificial
  Oligomer
aggcuugagaggcacauuc

SEQ ID NO: 3722 - RNA, 19 nt, artificial
  Oligomer
ugaaugucacauacuccac

SEQ ID NO: 3723 - RNA, 19 nt, artificial
  Oligomer
aaggcuauugucaugauca

SEQ ID NO: 3724 - RNA, 19 nt, artificial
  Oligomer
ugaauaaguuuauucugcc

SEQ ID NO: 3725 - RNA, 19 nt, artificial
  Oligomer
ucccacaucucaaaagacu

SEQ ID NO: 3726 - RNA, 19 nt, artificial
  Oligomer
acaguaaacauguacacug

SEQ ID NO: 3727 - RNA, 19 nt, artificial
  Oligomer
aauggaacauuuguccagc

SEQ ID NO: 3728 - RNA, 19 nt, artificial
  Oligomer
uucgggacuggaugggauu

SEQ ID NO: 3729 - RNA, 19 nt, artificial
  Oligomer
ucaggaauggaacauuugu

SEQ ID NO: 3730 - RNA, 19 nt, artificial
  Oligomer
uucaggaaggcauccacaa

SEQ ID NO: 3731 - RNA, 19 nt, artificial
  Oligomer
uuccugggaaugaauaagu

SEQ ID NO: 3732 - RNA, 19 nt, artificial
  Oligomer
ucaaaguaaaaggaugcca

SEQ ID NO: 3733 - RNA, 19 nt, artificial
  Oligomer
acacuugcgaggaugacuc

SEQ ID NO: 3734 - RNA, 19 nt, artificial
  Oligomer
auuguuguucgaaagcccu

SEQ ID NO: 3735 - RNA, 19 nt, artificial
  Oligomer
auccaugggcuuuaagaac

SEQ ID NO: 3736 - RNA, 19 nt, artificial
  Oligomer
uccuuucacagauauaaag

SEQ ID NO: 3737 - RNA, 19 nt, artificial
  Oligomer
auuccaaaacuuuggaugg

SEQ ID NO: 3738 - RNA, 19 nt, artificial
  Oligomer
uauaccagaagacuucaaa

SEQ ID NO: 3739 - RNA, 19 nt, artificial
  Oligomer
uucacacuggauaagacca

SEQ ID NO: 3740 - RNA, 19 nt, artificial
  Oligomer
uuucuaggauccagacugg

SEQ ID NO: 3741 - RNA, 19 nt, artificial
  Oligomer
gacaaaaugcagauuaccg

SEQ ID NO: 3742 - RNA, 19 nt, artificial
  Oligomer
uguggaaggugagguugug

SEQ ID NO: 3743 - RNA, 19 nt, artificial
  Oligomer
aaccggaggauccuuucac

SEQ ID NO: 3744 - RNA, 19 nt, artificial
  Oligomer
uauguaggcagaucauaua

SEQ ID NO: 3745 - RNA, 19 nt, artificial
  Oligomer
uacaaagagacaaaaugca

SEQ ID NO: 3746 - RNA, 19 nt, artificial
  Oligomer
uucuggagagguccuucag

SEQ ID NO: 3747 - RNA, 19 nt, artificial
  Oligomer
ugggauuaguuguauaacu

SEQ ID NO: 3748 - RNA, 19 nt, artificial
  Oligomer
ugaaguagaauugaaccuu

SEQ ID NO: 3749 - RNA, 19 nt, artificial
  Oligomer
ugucggcuucugcuauagc

SEQ ID NO: 3750 - RNA, 19 nt, artificial
  Oligomer
uucagcccuaaccaaacaa

SEQ ID NO: 3751 - RNA, 19 nt, artificial
  Oligomer
aaguaaaaggaugccauuc

SEQ ID NO: 3752 - RNA, 19 nt, artificial
  Oligomer
cuuaaguugcugaagcuca

SEQ ID NO: 3753 - RNA, 19 nt, artificial
  Oligomer
cagauauaaagaaugaccg

SEQ ID NO: 3754 - RNA, 19 nt, artificial
  Oligomer
aaaggagguuuucuguuuc

SEQ ID NO: 3755 - RNA, 19 nt, artificial
  Oligomer
uuaccaugagaaucaaggc

SEQ ID NO: 3756 - RNA, 19 nt, artificial
  Oligomer
gugaauagcuguauguagg

SEQ ID NO: 3757 - RNA, 19 nt, artificial
  Oligomer
uuuucugagaaaggaucca

SEQ ID NO: 3758 - RNA, 19 nt, artificial
  Oligomer
cuuaugagauuuucugucc

SEQ ID NO: 3759 - RNA, 19 nt, artificial
  Oligomer
acgaucaucccacaucuca

SEQ ID NO: 3760 - RNA, 19 nt, artificial
  Oligomer
uuaaguugcugaagcucaa

SEQ ID NO: 3761 - RNA, 19 nt, artificial
  Oligomer
augccauuccaggagagag

SEQ ID NO: 3762 - RNA, 19 nt, artificial
  Oligomer
augaucacuccagugagac

SEQ ID NO: 3763 - RNA, 19 nt, artificial
  Oligomer
auaagaaaacucccacuac

SEQ ID NO: 3764 - RNA, 19 nt, artificial
  Oligomer
ugaugugaauagcuguaug

SEQ ID NO: 3765 - RNA, 19 nt, artificial
  Oligomer
aauggagaagaaaucuucc

SEQ ID NO: 3766 - RNA, 19 nt, artificial
  Oligomer
aacaggugugcaaugaugu

SEQ ID NO: 3767 - RNA, 19 nt, artificial
  Oligomer
aaaaagucacccuacuuag

SEQ ID NO: 3768 - RNA, 19 nt, artificial
  Oligomer
ucccauugucaagaggugg

SEQ ID NO: 3769 - RNA, 19 nt, artificial
  Oligomer
acaaaaugcagauuaccgu

SEQ ID NO: 3770 - RNA, 19 nt, artificial
  Oligomer
uaccaugagaaucaaggcu

SEQ ID NO: 3771 - RNA, 19 nt, artificial
  Oligomer
ugcggcugcaaaaugagca

SEQ ID NO: 3772 - RNA, 19 nt, artificial
  Oligomer
aaacauucagcccuaacca

SEQ ID NO: 3773 - RNA, 19 nt, artificial
  Oligomer
aagaaaacucccacuacag

SEQ ID NO: 3774 - RNA, 19 nt, artificial
  Oligomer
guccuuauuccuauaacuc

SEQ ID NO: 3775 - RNA, 19 nt, artificial
  Oligomer
ucggauaugaauggagaag

SEQ ID NO: 3776 - RNA, 19 nt, artificial
  Oligomer
caaguaacgaaguugaaug

SEQ ID NO: 3777 - RNA, 19 nt, artificial
  Oligomer
auccaauugcuuucucagu

SEQ ID NO: 3778 - RNA, 19 nt, artificial
  Oligomer
ucuggagcagaggucaaag

SEQ ID NO: 3779 - RNA, 19 nt, artificial
  Oligomer
ucagcccuaaccaaacaac

SEQ ID NO: 3780 - RNA, 19 nt, artificial
  Oligomer
uaguaguauuugucggccu

SEQ ID NO: 3781 - RNA, 19 nt, artificial
  Oligomer
aagguggugaguauaccag

SEQ ID NO: 3782 - RNA, 19 nt, artificial
  Oligomer
guucuuaaguugcugaagc

SEQ ID NO: 3783 - RNA, 19 nt, artificial
  Oligomer
uuuaaugcugcaugaccaa

SEQ ID NO: 3784 - RNA, 19 nt, artificial
  Oligomer
aaccuuucuaggauccaga

SEQ ID NO: 3785 - RNA, 19 nt, artificial
  Oligomer
aaagugacaguaaacaugu

SEQ ID NO: 3786 - RNA, 19 nt, artificial
  Oligomer
augcucuccucuguuugac

SEQ ID NO: 3787 - RNA, 19 nt, artificial
  Oligomer
aucaaaagugacaguaaac

SEQ ID NO: 3788 - RNA, 19 nt, artificial
  Oligomer
uucucaucaugagauaggc

SEQ ID NO: 3789 - RNA, 19 nt, artificial
  Oligomer
uaccagauggauuucaaga

SEQ ID NO: 3790 - RNA, 19 nt, artificial
  Oligomer
aguaaaaggaugccauucc

SEQ ID NO: 3791 - RNA, 19 nt, artificial
  Oligomer
cuuuuuuguuuugagguug

SEQ ID NO: 3792 - RNA, 19 nt, artificial
  Oligomer
augaauggagaagaaaucu

SEQ ID NO: 3793 - RNA, 19 nt, artificial
  Oligomer
augugaaaaacacacaccu

SEQ ID NO: 3794 - RNA, 19 nt, artificial
  Oligomer
ucucauauuucaggaaggc

SEQ ID NO: 3795 - RNA, 19 nt, artificial
  Oligomer
aaagugacugcucaaaccu

SEQ ID NO: 3796 - RNA, 19 nt, artificial
  Oligomer
auccagacuggaauaucgg

SEQ ID NO: 3797 - RNA, 19 nt, artificial
  Oligomer
ucggcuucugcuauagcag

SEQ ID NO: 3798 - RNA, 19 nt, artificial
  Oligomer
gugcuguuaaaauucaagc

SEQ ID NO: 3799 - RNA, 19 nt, artificial
  Oligomer
auccuaaagugacugcuca

SEQ ID NO: 3800 - RNA, 19 nt, artificial
  Oligomer
uuaugagauuuucugucca

SEQ ID NO: 3801 - RNA, 19 nt, artificial
  Oligomer
uaggcagaucauauaggcc

SEQ ID NO: 3802 - RNA, 19 nt, artificial
  Oligomer
ucuuugccaaaguccgagg

SEQ ID NO: 3803 - RNA, 19 nt, artificial
  Oligomer
ugcccuucaaacuuagggc

SEQ ID NO: 3804 - RNA, 19 nt, artificial
  Oligomer
guuuaaugcugcaugacca

SEQ ID NO: 3805 - RNA, 19 nt, artificial
  Oligomer
aaauucaagcagagagcag

SEQ ID NO: 3806 - RNA, 19 nt, artificial
  Oligomer
uguugacccaaggauuuuu

SEQ ID NO: 3807 - RNA, 19 nt, artificial
  Oligomer
aagugacugcucaaaccug

SEQ ID NO: 3808 - RNA, 19 nt, artificial
  Oligomer
caaaguuuaaugcugcaug

SEQ ID NO: 3809 - RNA, 19 nt, artificial
  Oligomer
auugaaccuuucuaggauc

SEQ ID NO: 3810 - RNA, 19 nt, artificial
  Oligomer
cuuagaaaucuucuguggg

SEQ ID NO: 3811 - RNA, 19 nt, artificial
  Oligomer
gucacgaucaucccacauc

SEQ ID NO: 3812 - RNA, 19 nt, artificial
  Oligomer
acuugcgaggaugacucuc

SEQ ID NO: 3813 - RNA, 19 nt, artificial
  Oligomer
cucuuugccaaaguccgag

SEQ ID NO: 3814 - RNA, 19 nt, artificial
  Oligomer
acucugaaccaccaaaccu

SEQ ID NO: 3815 - RNA, 19 nt, artificial
  Oligomer
gaagacuucaaaauaacuc

SEQ ID NO: 3816 - RNA, 19 nt, artificial
  Oligomer
guaaucacaaccuucugcu

SEQ ID NO: 3817 - RNA, 19 nt, artificial
  Oligomer
aaaauaacuccuccggaug

SEQ ID NO: 3818 - RNA, 19 nt, artificial
  Oligomer
aaguuuauucugccuuccu

SEQ ID NO: 3819 - RNA, 19 nt, artificial
  Oligomer
ucacccuacuuagaaaucu

SEQ ID NO: 3820 - RNA, 19 nt, artificial
  Oligomer
augcuggugaaugucacau

SEQ ID NO: 3821 - RNA, 19 nt, artificial
  Oligomer
uuggucucccaaaggaggu

SEQ ID NO: 3822 - RNA, 19 nt, artificial
  Oligomer
acccaguuucccauuguca

SEQ ID NO: 3823 - RNA, 19 nt, artificial
  Oligomer
ugcucggauaugaauggag

SEQ ID NO: 3824 - RNA, 19 nt, artificial
  Oligomer
augggauuuagccaagaac

SEQ ID NO: 3825 - RNA, 19 nt, artificial
  Oligomer
ugagguuguggucugcaca

SEQ ID NO: 3826 - RNA, 19 nt, artificial
  Oligomer
ugcacacuggaauuuguac

SEQ ID NO: 3827 - RNA, 19 nt, artificial
  Oligomer
guuauuuuucugagaaagg

SEQ ID NO: 3828 - RNA, 19 nt, artificial
  Oligomer
uggcuguccagaaagauuu

SEQ ID NO: 3829 - RNA, 19 nt, artificial
  Oligomer
ucaaacuuagggcgccuac

SEQ ID NO: 3830 - RNA, 19 nt, artificial
  Oligomer
aaacuuagggcgccuacag

SEQ ID NO: 3831 - RNA, 19 nt, artificial
  Oligomer
accauaucaaaagugacag

SEQ ID NO: 3832 - RNA, 19 nt, artificial
  Oligomer
uggaugggugcauaacaac

SEQ ID NO: 3833 - RNA, 19 nt, artificial
  Oligomer
cuggaauugauaaaaucac

SEQ ID NO: 3834 - RNA, 19 nt, artificial
  Oligomer
aucaagccuugcuacaguc

SEQ ID NO: 3835 - RNA, 19 nt, artificial
  Oligomer
ugucaugaucacuccagug

SEQ ID NO: 3836 - RNA, 19 nt, artificial
  Oligomer
aaaaagguggugaguauac

SEQ ID NO: 3837 - RNA, 19 nt, artificial
  Oligomer
aucaaggcuauugucauga

SEQ ID NO: 3838 - RNA, 19 nt, artificial
  Oligomer
uuucugagaaaggauccau

SEQ ID NO: 3839 - RNA, 19 nt, artificial
  Oligomer
cagcacagccacuucauac

SEQ ID NO: 3840 - RNA, 19 nt, artificial
  Oligomer
uaaguugcugaagcucaag

SEQ ID NO: 3841 - RNA, 19 nt, artificial
  Oligomer
uccuucucuggacagaacu

SEQ ID NO: 3842 - RNA, 19 nt, artificial
  Oligomer
ugcucaaaccugacgagac

SEQ ID NO: 3843 - RNA, 19 nt, artificial
  Oligomer
acucaggagaugguaacac

SEQ ID NO: 3844 - RNA, 19 nt, artificial
  Oligomer
agugaagaagaaaauccuu

SEQ ID NO: 3845 - RNA, 19 nt, artificial
  Oligomer
gucacauacuccacugucg

SEQ ID NO: 3846 - RNA, 19 nt, artificial
  Oligomer
uaaaaagguggugaguaua

SEQ ID NO: 3847 - RNA, 19 nt, artificial
  Oligomer
aucauauaggccaccagcu

SEQ ID NO: 3848 - RNA, 19 nt, artificial
  Oligomer
ccuuaugagauuuucuguc

SEQ ID NO: 3849 - RNA, 19 nt, artificial
  Oligomer
uagaagauaaaaagguggu

SEQ ID NO: 3850 - RNA, 19 nt, artificial
  Oligomer
guugacccaaggauuuuuc

SEQ ID NO: 3851 - RNA, 19 nt, artificial
  Oligomer
gcacacuggaauuuguacc

SEQ ID NO: 3852 - RNA, 19 nt, artificial
  Oligomer
ugguuuggagcccuucuag

SEQ ID NO: 3853 - RNA, 19 nt, artificial
  Oligomer
ucaucugcaauuccaaaac

SEQ ID NO: 3854 - RNA, 19 nt, artificial
  Oligomer
ucaauccugggaauuggug

SEQ ID NO: 3855 - RNA, 19 nt, artificial
  Oligomer
acaggaaaacauucagccc

SEQ ID NO: 3856 - RNA, 19 nt, artificial
  Oligomer
aaagaaugaccggugcaag

SEQ ID NO: 3857 - RNA, 19 nt, artificial
  Oligomer
cucaucaugagauaggcug

SEQ ID NO: 3858 - RNA, 19 nt, artificial
  Oligomer
ugggugcauaacaaccuug

SEQ ID NO: 3859 - RNA, 19 nt, artificial
  Oligomer
ugcugaagcucaaguaacg

SEQ ID NO: 3860 - RNA, 19 nt, artificial
  Oligomer
agugacugcucaaaccuga

SEQ ID NO: 3861 - RNA, 19 nt, artificial
  Oligomer
caaaaaaagaauaccaggg

SEQ ID NO: 3862 - RNA, 19 nt, artificial
  Oligomer
ugcagauuaccguccuuau

SEQ ID NO: 3863 - RNA, 19 nt, artificial
  Oligomer
aguuuauucugccuuccuu

SEQ ID NO: 3864 - RNA, 19 nt, artificial
  Oligomer
aauaucggugacagcauuu

SEQ ID NO: 3865 - RNA, 19 nt, artificial
  Oligomer
ugaagauacaaagagacaa

SEQ ID NO: 3866 - RNA, 19 nt, artificial
  Oligomer
agccuugcuacagucaugg

SEQ ID NO: 3867 - RNA, 19 nt, artificial
  Oligomer
guuaaccacccaguuuccc

SEQ ID NO: 3868 - RNA, 19 nt, artificial
  Oligomer
aacgaaguugaaugcaauc

SEQ ID NO: 3869 - RNA, 19 nt, artificial
  Oligomer
aucucaaaagacucugcac

SEQ ID NO: 3870 - RNA, 19 nt, artificial
  Oligomer
acccuacuuagaaaucuuc

SEQ ID NO: 3871 - RNA, 19 nt, artificial
  Oligomer
uguuucagaccugucacga

SEQ ID NO: 3872 - RNA, 19 nt, artificial
  Oligomer
cacauucuuauccuaaagu

SEQ ID NO: 3873 - RNA, 19 nt, artificial
  Oligomer
uucugcuauagcagucaaa

SEQ ID NO: 3874 - RNA, 19 nt, artificial
  Oligomer
auaacuccuccggaugaac

SEQ ID NO: 3875 - RNA, 19 nt, artificial
  Oligomer
ugagccuuuaagaugugaa

SEQ ID NO: 3876 - RNA, 19 nt, artificial
  Oligomer
aaaacauccucacuggcug

SEQ ID NO: 3877 - RNA, 19 nt, artificial
  Oligomer
acuucaauccugggaauug

SEQ ID NO: 3878 - RNA, 19 nt, artificial
  Oligomer
guugugauccaauugcuuu

SEQ ID NO: 3879 - RNA, 19 nt, artificial
  Oligomer
cagaacuuuaagaacuuca

SEQ ID NO: 3880 - RNA, 19 nt, artificial
  Oligomer
aggcucuuugccaaagucc

SEQ ID NO: 3881 - RNA, 19 nt, artificial
  Oligomer
ugaucacuccagugagacc

SEQ ID NO: 3882 - RNA, 19 nt, artificial
  Oligomer
gucaguggccuugucaaag

SEQ ID NO: 3883 - RNA, 19 nt, artificial
  Oligomer
aaaagacucugcacacuug

SEQ ID NO: 3884 - RNA, 19 nt, artificial
  Oligomer
acaaccuugguaaucacaa

SEQ ID NO: 3885 - RNA, 19 nt, artificial
  Oligomer
cauucuuauccuaaaguga

SEQ ID NO: 3886 - RNA, 19 nt, artificial
  Oligomer
agaaguucuuaaguugcug

SEQ ID NO: 3887 - RNA, 19 nt, artificial
  Oligomer
ucaugaucacuccagugag

SEQ ID NO: 3888 - RNA, 19 nt, artificial
  Oligomer
ucugccuuccuucucugga

SEQ ID NO: 3889 - RNA, 19 nt, artificial
  Oligomer
acuuccaugcugaagccac

SEQ ID NO: 3890 - RNA, 19 nt, artificial
  Oligomer
uaacgaaguugaaugcaau

SEQ ID NO: 3891 - RNA, 19 nt, artificial
  Oligomer
aacucugaaccaccaaacc

SEQ ID NO: 3892 - RNA, 19 nt, artificial
  Oligomer
agcucaaguaacgaaguug

SEQ ID NO: 3893 - RNA, 19 nt, artificial
  Oligomer
agugagaccagcaaugcug

SEQ ID NO: 3894 - RNA, 19 nt, artificial
  Oligomer
agcuauuguagaaaacuca

SEQ ID NO: 3895 - RNA, 19 nt, artificial
  Oligomer
aauuuguaccagauggauu

SEQ ID NO: 3896 - RNA, 19 nt, artificial
  Oligomer
guaguaguauuugucggcc

SEQ ID NO: 3897 - RNA, 19 nt, artificial
  Oligomer
agaacuuuaagaacuucag

SEQ ID NO: 3898 - RNA, 19 nt, artificial
  Oligomer
cuucagaacuuuaagaacu

SEQ ID NO: 3899 - RNA, 19 nt, artificial
  Oligomer
cuccggaugaacucaguag

SEQ ID NO: 3900 - RNA, 19 nt, artificial
  Oligomer
gaaggcauccacaaacagg

SEQ ID NO: 3901 - RNA, 19 nt, artificial
  Oligomer
aucugcaauuccaaaacuu

SEQ ID NO: 3902 - RNA, 19 nt, artificial
  Oligomer
uucaauccugggaauuggu

SEQ ID NO: 3903 - RNA, 19 nt, artificial
  Oligomer
aaaccugacgagaccaagu

SEQ ID NO: 3904 - RNA, 19 nt, artificial
  Oligomer
ugugcggcugcaaaaugag

SEQ ID NO: 3905 - RNA, 19 nt, artificial
  Oligomer
uagaaaacucauuguccca

SEQ ID NO: 3906 - RNA, 19 nt, artificial
  Oligomer
aagccaaggauauagaaga

SEQ ID NO: 3907 - RNA, 19 nt, artificial
  Oligomer
aucagcgugcuguuaaaau

SEQ ID NO: 3908 - RNA, 19 nt, artificial
  Oligomer
uucugcugggagcgguaaa

SEQ ID NO: 3909 - RNA, 19 nt, artificial
  Oligomer
acaaacaggaaaacauuca

SEQ ID NO: 3910 - RNA, 19 nt, artificial
  Oligomer
cugggaaugaauaaguuua

SEQ ID NO: 3911 - RNA, 19 nt, artificial
  Oligomer
acgaaguugaaugcaauca

SEQ ID NO: 3912 - RNA, 19 nt, artificial
  Oligomer
uugauaaaaucaccuggga

SEQ ID NO: 3913 - RNA, 19 nt, artificial
  Oligomer
aaaacucccacuacagacu

SEQ ID NO: 3914 - RNA, 19 nt, artificial
  Oligomer
auuccugcuccaaccagca

SEQ ID NO: 3915 - RNA, 19 nt, artificial
  Oligomer
uaugagauuuucuguccag

SEQ ID NO: 3916 - RNA, 19 nt, artificial
  Oligomer
ucugcacacuggaauuugu

SEQ ID NO: 3917 - RNA, 19 nt, artificial
  Oligomer
acucauugucccacauugg

SEQ ID NO: 3918 - RNA, 19 nt, artificial
  Oligomer
aagaauaccagggagucaa

SEQ ID NO: 3919 - RNA, 19 nt, artificial
  Oligomer
ucaagccuugcuacaguca

SEQ ID NO: 3920 - RNA, 19 nt, artificial
  Oligomer
ucagaacuuuaagaacuuc

SEQ ID NO: 3921 - RNA, 19 nt, artificial
  Oligomer
uggaacauuuguccagcgc

SEQ ID NO: 3922 - RNA, 19 nt, artificial
  Oligomer
acuuuaagaacuucagaag

SEQ ID NO: 3923 - RNA, 19 nt, artificial
  Oligomer
ugccauuccaggagagaga

SEQ ID NO: 3924 - RNA, 19 nt, artificial
  Oligomer
gauuaguuguauaacucug

SEQ ID NO: 3925 - RNA, 19 nt, artificial
  Oligomer
aaggaugccauuccaggag

SEQ ID NO: 3926 - RNA, 19 nt, artificial
  Oligomer
cagcccuaaccaaacaacc

SEQ ID NO: 3927 - RNA, 19 nt, artificial
  Oligomer
uuguggucugcacacugga

SEQ ID NO: 3928 - RNA, 19 nt, artificial
  Oligomer
uaagaacuucagaaguucu

SEQ ID NO: 3929 - RNA, 19 nt, artificial
  Oligomer
uacugaagauacaaagaga

SEQ ID NO: 3930 - RNA, 19 nt, artificial
  Oligomer
agaccugucacgaugucag

SEQ ID NO: 3931 - RNA, 19 nt, artificial
  Oligomer
uuggagcccuucuaggcaa

SEQ ID NO: 3932 - RNA, 19 nt, artificial
  Oligomer
auugucccacauuggucuc

SEQ ID NO: 3933 - RNA, 19 nt, artificial
  Oligomer
cagaggucaaaguaaaagg

SEQ ID NO: 3934 - RNA, 19 nt, artificial
  Oligomer
uaccagaagacuucaaaau

SEQ ID NO: 3935 - RNA, 19 nt, artificial
  Oligomer
aaugaccggugcaaggauc

SEQ ID NO: 3936 - RNA, 19 nt, artificial
  Oligomer
cuucauacuggaaaacauc

SEQ ID NO: 3937 - RNA, 19 nt, artificial
  Oligomer
ugggagggacaaaagauua

SEQ ID NO: 3938 - RNA, 19 nt, artificial
  Oligomer
ucaaaagacucugcacacu

SEQ ID NO: 3939 - RNA, 19 nt, artificial
  Oligomer
cuaaagugacugcucaaac

SEQ ID NO: 3940 - RNA, 19 nt, artificial
  Oligomer
ugcuauagcagucaaaguu

SEQ ID NO: 3941 - RNA, 19 nt, artificial
  Oligomer
auuugucggccuucucaua

SEQ ID NO: 3942 - RNA, 19 nt, artificial
  Oligomer
uuucgggacuggaugggau

SEQ ID NO: 3943 - RNA, 19 nt, artificial
  Oligomer
aaugaugugaauagcugua

SEQ ID NO: 3944 - RNA, 19 nt, artificial
  Oligomer
aacauguacacuguuggug

SEQ ID NO: 3945 - RNA, 19 nt, artificial
  Oligomer
acaaagagacaaaaugcag

SEQ ID NO: 3946 - RNA, 19 nt, artificial
  Oligomer
augguaacacuggaauuga

SEQ ID NO: 3947 - RNA, 19 nt, artificial
  Oligomer
agacaaaaugcagauuacc

SEQ ID NO: 3948 - RNA, 19 nt, artificial
  Oligomer
uccgagggccacauaagaa

SEQ ID NO: 3949 - RNA, 19 nt, artificial
  Oligomer
caggaaggcauccacaaac

SEQ ID NO: 3950 - RNA, 19 nt, artificial
  Oligomer
ccauccacuucaauccugg

SEQ ID NO: 3951 - RNA, 19 nt, artificial
  Oligomer
cacaucucaaaagacucug

SEQ ID NO: 3952 - RNA, 19 nt, artificial
  Oligomer
uggagcagaggucaaagua

SEQ ID NO: 3953 - RNA, 19 nt, artificial
  Oligomer
caggaaaacauucagcccu

SEQ ID NO: 3954 - RNA, 19 nt, artificial
  Oligomer
aagaaugaccggugcaagg

SEQ ID NO: 3955 - RNA, 19 nt, artificial
  Oligomer
agauaggcuggagagaaug

SEQ ID NO: 3956 - RNA, 19 nt, artificial
  Oligomer
ugagauaggcuggagagaa

SEQ ID NO: 3957 - RNA, 19 nt, artificial
  Oligomer
uggaaaacauccucacugg

SEQ ID NO: 3958 - RNA, 19 nt, artificial
  Oligomer
uuccuucucuggacagaac

SEQ ID NO: 3959 - RNA, 19 nt, artificial
  Oligomer
accucugcuaucaagccuu

SEQ ID NO: 3960 - RNA, 19 nt, artificial
  Oligomer
agaaacaaaacugaaaacc

SEQ ID NO: 3961 - RNA, 19 nt, artificial
  Oligomer
accaaaacucaggagaugg

SEQ ID NO: 3962 - RNA, 19 nt, artificial
  Oligomer
cacauaagaaaacucccac

SEQ ID NO: 3963 - RNA, 19 nt, artificial
  Oligomer
guugaaguagaauugaacc

SEQ ID NO: 3964 - RNA, 19 nt, artificial
  Oligomer
ucaccugggauuaguugua

SEQ ID NO: 3965 - RNA, 19 nt, artificial
  Oligomer
ucaguggccuugucaaagu

SEQ ID NO: 3966 - RNA, 19 nt, artificial
  Oligomer
agaugugaaaaacacacac

SEQ ID NO: 3967 - RNA, 19 nt, artificial
  Oligomer
ucaaaguuuaaugcugcau

SEQ ID NO: 3968 - RNA, 19 nt, artificial
  Oligomer
cucauucaugcucuccucu

SEQ ID NO: 3969 - RNA, 19 nt, artificial
  Oligomer
auauuucaggaaggcaucc

SEQ ID NO: 3970 - RNA, 19 nt, artificial
  Oligomer
aauguugacccaaggauuu

SEQ ID NO: 3971 - RNA, 19 nt, artificial
  Oligomer
aaaagaauaccagggaguc

SEQ ID NO: 3972 - RNA, 19 nt, artificial
  Oligomer
cugugagccuuuaagaugu

SEQ ID NO: 3973 - RNA, 19 nt, artificial
  Oligomer
gcccuuaugagauuuucug

SEQ ID NO: 3974 - RNA, 19 nt, artificial
  Oligomer
acauaagaaaacucccacu

SEQ ID NO: 3975 - RNA, 19 nt, artificial
  Oligomer
cucaaaagacucugcacac

SEQ ID NO: 3976 - RNA, 19 nt, artificial
  Oligomer
aaaggaugccauuccagga

SEQ ID NO: 3977 - RNA, 19 nt, artificial
  Oligomer
guagaaaacucauuguccc

SEQ ID NO: 3978 - RNA, 19 nt, artificial
  Oligomer
gaaaacucccacuacagac

SEQ ID NO: 3979 - RNA, 19 nt, artificial
  Oligomer
agaaaacucauugucccac

SEQ ID NO: 3980 - RNA, 19 nt, artificial
  Oligomer
gcgaggaugacucucauuc

SEQ ID NO: 3981 - RNA, 19 nt, artificial
  Oligomer
caaaaugcagauuaccguc

SEQ ID NO: 3982 - RNA, 19 nt, artificial
  Oligomer
augagauuuucuguccagu

SEQ ID NO: 3983 - RNA, 19 nt, artificial
  Oligomer
guguaguaguauuugucgg

SEQ ID NO: 3984 - RNA, 19 nt, artificial
  Oligomer
ucaguagcugaaguuacca

SEQ ID NO: 3985 - RNA, 19 nt, artificial
  Oligomer
accauccacuucaauccug

SEQ ID NO: 3986 - RNA, 19 nt, artificial
  Oligomer
gagguugugauccaauugc

SEQ ID NO: 3987 - RNA, 19 nt, artificial
  Oligomer
gcaacagggaagauucagc

SEQ ID NO: 3988 - RNA, 19 nt, artificial
  Oligomer
caaaccucugcuaucaagc

SEQ ID NO: 3989 - RNA, 19 nt, artificial
  Oligomer
cuguccagaaagauuuaca

SEQ ID NO: 3990 - RNA, 19 nt, artificial
  Oligomer
agcagauugcgacacacag

SEQ ID NO: 3991 - RNA, 19 nt, artificial
  Oligomer
acaucucaaaagacucugc

SEQ ID NO: 3992 - RNA, 19 nt, artificial
  Oligomer
uucaaacuuagggcgccua

SEQ ID NO: 3993 - RNA, 19 nt, artificial
  Oligomer
caggaauggaacauuuguc

SEQ ID NO: 3994 - RNA, 19 nt, artificial
  Oligomer
acauucagcccuaaccaaa

SEQ ID NO: 3995 - RNA, 19 nt, artificial
  Oligomer
cuuuaagaacuucagaacu

SEQ ID NO: 3996 - RNA, 19 nt, artificial
  Oligomer
gacuggaugggauuuagcc

SEQ ID NO: 3997 - RNA, 19 nt, artificial
  Oligomer
aauauuguuguucgaaagc

SEQ ID NO: 3998 - RNA, 19 nt, artificial
  Oligomer
cauacuggaaaacauccuc

SEQ ID NO: 3999 - RNA, 19 nt, artificial
  Oligomer
ugcuguuaaaauucaagca

SEQ ID NO: 4000 - RNA, 19 nt, artificial
  Oligomer
auaccagggagucaaggcu

SEQ ID NO: 4001 - RNA, 19 nt, artificial
  Oligomer
auaaagaaugaccggugca

SEQ ID NO: 4002 - RNA, 19 nt, artificial
  Oligomer
ugguaaucacaaccuucug

SEQ ID NO: 4003 - RNA, 19 nt, artificial
  Oligomer
agcccuuaugagauuuucu

SEQ ID NO: 4004 - RNA, 19 nt, artificial
  Oligomer
aggaugacucucauucaug

SEQ ID NO: 4005 - RNA, 19 nt, artificial
  Oligomer
ugcaaugaugugaauagcu

SEQ ID NO: 4006 - RNA, 19 nt, artificial
  Oligomer
cauccauuuacccucacaa

SEQ ID NO: 4007 - RNA, 19 nt, artificial
  Oligomer
agaugaggauccuagaaaa

SEQ ID NO: 4008 - RNA, 19 nt, artificial
  Oligomer
cagugaagacuuuguugaa

SEQ ID NO: 4009 - RNA, 19 nt, artificial
  Oligomer
ccggcugcaucagucuuaa

SEQ ID NO: 4010 - RNA, 19 nt, artificial
  Oligomer
caugaagcaggacucuaaa

SEQ ID NO: 4011 - RNA, 19 nt, artificial
  Oligomer
cagaguuuacccagcacaa

SEQ ID NO: 4012 - RNA, 19 nt, artificial
  Oligomer
auccauuuacccucacaau

SEQ ID NO: 4013 - RNA, 19 nt, artificial
  Oligomer
ucauccauuuacccucaca

SEQ ID NO: 4014 - RNA, 19 nt, artificial
  Oligomer
ccuguuggaugacuggaaa

SEQ ID NO: 4015 - RNA, 19 nt, artificial
  Oligomer
cgagaugaggauccuagaa

SEQ ID NO: 4016 - RNA, 19 nt, artificial
  Oligomer
gguauauccggagcaauaa

SEQ ID NO: 4017 - RNA, 19 nt, artificial
  Oligomer
cauuuacccucacaaugug

SEQ ID NO: 4018 - RNA, 19 nt, artificial
  Oligomer
agaugaccgucacauuaca

SEQ ID NO: 4019 - RNA, 19 nt, artificial
  Oligomer
ccgagaugaggauccuaga

SEQ ID NO: 4020 - RNA, 19 nt, artificial
  Oligomer
aguguaucugcauuagaaa

SEQ ID NO: 4021 - RNA, 19 nt, artificial
  Oligomer
aggagauuguuggauaaaa

SEQ ID NO: 4022 - RNA, 19 nt, artificial
  Oligomer
gacccaauucacuauccaa

SEQ ID NO: 4023 - RNA, 19 nt, artificial
  Oligomer
ccguugguuugcagauuua

SEQ ID NO: 4024 - RNA, 19 nt, artificial
  Oligomer
ccaugaauguccugcuuuu

SEQ ID NO: 4025 - RNA, 19 nt, artificial
  Oligomer
ggguaugcagagauaucca

SEQ ID NO: 4026 - RNA, 19 nt, artificial
  Oligomer
ggagauuguuggauaaaag

SEQ ID NO: 4027 - RNA, 19 nt, artificial
  Oligomer
gcaagaugaccgucacauu

SEQ ID NO: 4028 - RNA, 19 nt, artificial
  Oligomer
caucaauacucaacacccu

SEQ ID NO: 4029 - RNA, 19 nt, artificial
  Oligomer
cacaauguguccaacugaa

SEQ ID NO: 4030 - RNA, 19 nt, artificial
  Oligomer
caucuguucuuaaccucaa

SEQ ID NO: 4031 - RNA, 19 nt, artificial
  Oligomer
ccauuuacccucacaaugu

SEQ ID NO: 4032 - RNA, 19 nt, artificial
  Oligomer
caagaugaccgucacauua

SEQ ID NO: 4033 - RNA, 19 nt, artificial
  Oligomer
guguccaacugaaaccaaa

SEQ ID NO: 4034 - RNA, 19 nt, artificial
  Oligomer
ccuucuugcuguauaacca

SEQ ID NO: 4035 - RNA, 19 nt, artificial
  Oligomer
ggaagagcccagauuccaa

SEQ ID NO: 4036 - RNA, 19 nt, artificial
  Oligomer
aagacuuuguugaacugaa

SEQ ID NO: 4037 - RNA, 19 nt, artificial
  Oligomer
ccuguacugugccgaaaga

SEQ ID NO: 4038 - RNA, 19 nt, artificial
  Oligomer
cccucagaugucauggaaa

SEQ ID NO: 4039 - RNA, 19 nt, artificial
  Oligomer
agacuuuguugaacugaau

SEQ ID NO: 4040 - RNA, 19 nt, artificial
  Oligomer
gguggaaacuuuuguuuga

SEQ ID NO: 4041 - RNA, 19 nt, artificial
  Oligomer
ccaacugaaaccaaagcaa

SEQ ID NO: 4042 - RNA, 19 nt, artificial
  Oligomer
gcacacuguugauuuucau

SEQ ID NO: 4043 - RNA, 19 nt, artificial
  Oligomer
gaaagacuuuacagguaua

SEQ ID NO: 4044 - RNA, 19 nt, artificial
  Oligomer
guguaucugcauuagaaaa

SEQ ID NO: 4045 - RNA, 19 nt, artificial
  Oligomer
uguugauuuucauggugga

SEQ ID NO: 4046 - RNA, 19 nt, artificial
  Oligomer
caaacagaugggauacaga

SEQ ID NO: 4047 - RNA, 19 nt, artificial
  Oligomer
gaguuuacccagcacaaau

SEQ ID NO: 4048 - RNA, 19 nt, artificial
  Oligomer
cccucaacuucucagugaa

SEQ ID NO: 4049 - RNA, 19 nt, artificial
  Oligomer
cagucaaacagaugggaua

SEQ ID NO: 4050 - RNA, 19 nt, artificial
  Oligomer
cccaauucacuauccaaga

SEQ ID NO: 4051 - RNA, 19 nt, artificial
  Oligomer
ugagaauguggcaagauga

SEQ ID NO: 4052 - RNA, 19 nt, artificial
  Oligomer
cauuugcaucaauacucaa

SEQ ID NO: 4053 - RNA, 19 nt, artificial
  Oligomer
guuuaaucuggaaaccaaa

SEQ ID NO: 4054 - RNA, 19 nt, artificial
  Oligomer
cuucuugcuguauaaccaa

SEQ ID NO: 4055 - RNA, 19 nt, artificial
  Oligomer
ccagcuguaccucagucaa

SEQ ID NO: 4056 - RNA, 19 nt, artificial
  Oligomer
gcaaaauauaacagaggaa

SEQ ID NO: 4057 - RNA, 19 nt, artificial
  Oligomer
acaaguuuuggcaagagaa

SEQ ID NO: 4058 - RNA, 19 nt, artificial
  Oligomer
ccucagcaucuguucuuaa

SEQ ID NO: 4059 - RNA, 19 nt, artificial
  Oligomer
cuaggauugugucuaagca

SEQ ID NO: 4060 - RNA, 19 nt, artificial
  Oligomer
caagauaccgagaugagga

SEQ ID NO: 4061 - RNA, 19 nt, artificial
  Oligomer
gcaagaccuggucaguaua

SEQ ID NO: 4062 - RNA, 19 nt, artificial
  Oligomer
gaagguuccaagcaggaga

SEQ ID NO: 4063 - RNA, 19 nt, artificial
  Oligomer
gccuuauccuuuuacccau

SEQ ID NO: 4064 - RNA, 19 nt, artificial
  Oligomer
gacguugcauguuucagga

SEQ ID NO: 4065 - RNA, 19 nt, artificial
  Oligomer
gccucuacauaugcaauaa

SEQ ID NO: 4066 - RNA, 19 nt, artificial
  Oligomer
cuguguuaugccaaagaau

SEQ ID NO: 4067 - RNA, 19 nt, artificial
  Oligomer
auccaagacucuucauaaa

SEQ ID NO: 4068 - RNA, 19 nt, artificial
  Oligomer
cagaguauuucucagaaca

SEQ ID NO: 4069 - RNA, 19 nt, artificial
  Oligomer
ccgaauggucaaagaaaau

SEQ ID NO: 4070 - RNA, 19 nt, artificial
  Oligomer
uauccaagacucuucauaa

SEQ ID NO: 4071 - RNA, 19 nt, artificial
  Oligomer
gcuggaggcauuggaguaa

SEQ ID NO: 4072 - RNA, 19 nt, artificial
  Oligomer
aaaccaaagagacccugaa

SEQ ID NO: 4073 - RNA, 19 nt, artificial
  Oligomer
ccgucacauuacauguuua

SEQ ID NO: 4074 - RNA, 19 nt, artificial
  Oligomer
gcaucuguucuuaaccuca

SEQ ID NO: 4075 - RNA, 19 nt, artificial
  Oligomer
ccaugugccgaacacucuu

SEQ ID NO: 4076 - RNA, 19 nt, artificial
  Oligomer
ugugaagauuuguauggaa

SEQ ID NO: 4077 - RNA, 19 nt, artificial
  Oligomer
cagcuguaccucagucaaa

SEQ ID NO: 4078 - RNA, 19 nt, artificial
  Oligomer
gcauaacaaguuuuggcaa

SEQ ID NO: 4079 - RNA, 19 nt, artificial
  Oligomer
ugaggauccuagaaaacuu

SEQ ID NO: 4080 - RNA, 19 nt, artificial
  Oligomer
ugaucacagccucuacaua

SEQ ID NO: 4081 - RNA, 19 nt, artificial
  Oligomer
aacuguuccuggccugaca

SEQ ID NO: 4082 - RNA, 19 nt, artificial
  Oligomer
aggauugugucuaagcaga

SEQ ID NO: 4083 - RNA, 19 nt, artificial
  Oligomer
cuuugaaacucagcggaau

SEQ ID NO: 4084 - RNA, 19 nt, artificial
  Oligomer
gcccuucauucaaucuaga

SEQ ID NO: 4085 - RNA, 19 nt, artificial
  Oligomer
ugucguguuccucuuuaaa

SEQ ID NO: 4086 - RNA, 19 nt, artificial
  Oligomer
gggcugcugaaguaucaaa

SEQ ID NO: 4087 - RNA, 19 nt, artificial
  Oligomer
cuuuauuuggguaugcaga

SEQ ID NO: 4088 - RNA, 19 nt, artificial
  Oligomer
agguauauccggagcaaua

SEQ ID NO: 4089 - RNA, 19 nt, artificial
  Oligomer
auuuggguaugcagagaua

SEQ ID NO: 4090 - RNA, 19 nt, artificial
  Oligomer
cucagugaauuacagugaa

SEQ ID NO: 4091 - RNA, 19 nt, artificial
  Oligomer
cagugaauuacagugaaga

SEQ ID NO: 4092 - RNA, 19 nt, artificial
  Oligomer
aguaggagacuggacagaa

SEQ ID NO: 4093 - RNA, 19 nt, artificial
  Oligomer
ccauuugaggaaucacuga

SEQ ID NO: 4094 - RNA, 19 nt, artificial
  Oligomer
gccucagcaucuguucuua

SEQ ID NO: 4095 - RNA, 19 nt, artificial
  Oligomer
acugccuccaucuagucaa

SEQ ID NO: 4096 - RNA, 19 nt, artificial
  Oligomer
caggagauuguuggauaaa

SEQ ID NO: 4097 - RNA, 19 nt, artificial
  Oligomer
aacugaguaaccagaacaa

SEQ ID NO: 4098 - RNA, 19 nt, artificial
  Oligomer
gcuuccacucagucuuuga

SEQ ID NO: 4099 - RNA, 19 nt, artificial
  Oligomer
ggacagaacgauuucgaga

SEQ ID NO: 4100 - RNA, 19 nt, artificial
  Oligomer
aggagacuggacagaacga

SEQ ID NO: 4101 - RNA, 19 nt, artificial
  Oligomer
gacccugaagaauauuuga

SEQ ID NO: 4102 - RNA, 19 nt, artificial
  Oligomer
guuggauaaaagcagaaca

SEQ ID NO: 4103 - RNA, 19 nt, artificial
  Oligomer
gaguauuucucagaacauu

SEQ ID NO: 4104 - RNA, 19 nt, artificial
  Oligomer
cuuuuacccaugugccgaa

SEQ ID NO: 4105 - RNA, 19 nt, artificial
  Oligomer
uggucaguauauuacucua

SEQ ID NO: 4106 - RNA, 19 nt, artificial
  Oligomer
acaauguguccaacugaaa

SEQ ID NO: 4107 - RNA, 19 nt, artificial
  Oligomer
ggcugauugucguguuccu

SEQ ID NO: 4108 - RNA, 19 nt, artificial
  Oligomer
caugaucacagccucuaca

SEQ ID NO: 4109 - RNA, 19 nt, artificial
  Oligomer
ccgaaagacuuuacaggua

SEQ ID NO: 4110 - RNA, 19 nt, artificial
  Oligomer
uacucaacacccuguugga

SEQ ID NO: 4111 - RNA, 19 nt, artificial
  Oligomer
gcaggagaaccaggagauu

SEQ ID NO: 4112 - RNA, 19 nt, artificial
  Oligomer
uccgaauggucaaagaaaa

SEQ ID NO: 4113 - RNA, 19 nt, artificial
  Oligomer
cgaaagacuuuacagguau

SEQ ID NO: 4114 - RNA, 19 nt, artificial
  Oligomer
aaagagucuuucagcugaa

SEQ ID NO: 4115 - RNA, 19 nt, artificial
  Oligomer
gugucuaagcagagccuca

SEQ ID NO: 4116 - RNA, 19 nt, artificial
  Oligomer
agaugucauggaaauccga

SEQ ID NO: 4117 - RNA, 19 nt, artificial
  Oligomer
uacucuguauguugcauaa

SEQ ID NO: 4118 - RNA, 19 nt, artificial
  Oligomer
cgucacauuacauguuuaa

SEQ ID NO: 4119 - RNA, 19 nt, artificial
  Oligomer
cccugaaggauuuucaaaa

SEQ ID NO: 4120 - RNA, 19 nt, artificial
  Oligomer
ggaucacagaagguuccaa

SEQ ID NO: 4121 - RNA, 19 nt, artificial
  Oligomer
cugccuccaucuagucaag

SEQ ID NO: 4122 - RNA, 19 nt, artificial
  Oligomer
cucuacauaugcaauaaga

SEQ ID NO: 4123 - RNA, 19 nt, artificial
  Oligomer
ccaucauuucggucauaag

SEQ ID NO: 4124 - RNA, 19 nt, artificial
  Oligomer
ugguggugcuauuccucau

SEQ ID NO: 4125 - RNA, 19 nt, artificial
  Oligomer
auaugggacaagauuugaa

SEQ ID NO: 4126 - RNA, 19 nt, artificial
  Oligomer
gaaaugugagaauguggca

SEQ ID NO: 4127 - RNA, 19 nt, artificial
  Oligomer
caagcuaauuuuccacaga

SEQ ID NO: 4128 - RNA, 19 nt, artificial
  Oligomer
acuuugaaacucagcggaa

SEQ ID NO: 4129 - RNA, 19 nt, artificial
  Oligomer
ggaaauccgaauggucaaa

SEQ ID NO: 4130 - RNA, 19 nt, artificial
  Oligomer
cagguauauccggagcaau

SEQ ID NO: 4131 - RNA, 19 nt, artificial
  Oligomer
cacuauccaagacucuuca

SEQ ID NO: 4132 - RNA, 19 nt, artificial
  Oligomer
uguuuaaucuggaaaccaa

SEQ ID NO: 4133 - RNA, 19 nt, artificial
  Oligomer
agcccagauuccaagcuaa

SEQ ID NO: 4134 - RNA, 19 nt, artificial
  Oligomer
guauauugaugguccuuuu

SEQ ID NO: 4135 - RNA, 19 nt, artificial
  Oligomer
ucuucugguauacucauaa

SEQ ID NO: 4136 - RNA, 19 nt, artificial
  Oligomer
ugaacaaaugcaagauuga

SEQ ID NO: 4137 - RNA, 19 nt, artificial
  Oligomer
gcugacguugcauguuuca

SEQ ID NO: 4138 - RNA, 19 nt, artificial
  Oligomer
ucaucuggcucuccaugaa

SEQ ID NO: 4139 - RNA, 19 nt, artificial
  Oligomer
gauacagaagauaauugga

SEQ ID NO: 4140 - RNA, 19 nt, artificial
  Oligomer
guaacuccauuugcaucaa

SEQ ID NO: 4141 - RNA, 19 nt, artificial
  Oligomer
ggagaaccaggagauuguu

SEQ ID NO: 4142 - RNA, 19 nt, artificial
  Oligomer
ggaaacuuuuguuugauga

SEQ ID NO: 4143 - RNA, 19 nt, artificial
  Oligomer
ugcugaaguaucaaacuaa

SEQ ID NO: 4144 - RNA, 19 nt, artificial
  Oligomer
cugugguguuacuaucugu

SEQ ID NO: 4145 - RNA, 19 nt, artificial
  Oligomer
agaguuuacccagcacaaa

SEQ ID NO: 4146 - RNA, 19 nt, artificial
  Oligomer
aacuccauuugcaucaaua

SEQ ID NO: 4147 - RNA, 19 nt, artificial
  Oligomer
cuaugauaucuucugguau

SEQ ID NO: 4148 - RNA, 19 nt, artificial
  Oligomer
uugucguguuccucuuuaa

SEQ ID NO: 4149 - RNA, 19 nt, artificial
  Oligomer
aaaagcagaacauuccaua

SEQ ID NO: 4150 - RNA, 19 nt, artificial
  Oligomer
augugagaauguggcaaga

SEQ ID NO: 4151 - RNA, 19 nt, artificial
  Oligomer
gaaugcccucaacuucuca

SEQ ID NO: 4152 - RNA, 19 nt, artificial
  Oligomer
ugaagauuuguauggaaga

SEQ ID NO: 4153 - RNA, 19 nt, artificial
  Oligomer
gagacuggacagaacgauu

SEQ ID NO: 4154 - RNA, 19 nt, artificial
  Oligomer
ugguguuacuaucuguauu

SEQ ID NO: 4155 - RNA, 19 nt, artificial
  Oligomer
ugaaaacuuuugccaugaa

SEQ ID NO: 4156 - RNA, 19 nt, artificial
  Oligomer
cccagcacaaauuugugaa

SEQ ID NO: 4157 - RNA, 19 nt, artificial
  Oligomer
gaaccaggagauuguugga

SEQ ID NO: 4158 - RNA, 19 nt, artificial
  Oligomer
cagaacaacucauauggga

SEQ ID NO: 4159 - RNA, 19 nt, artificial
  Oligomer
aacucauaugggacaagau

SEQ ID NO: 4160 - RNA, 19 nt, artificial
  Oligomer
ggucauaagucaucccuca

SEQ ID NO: 4161 - RNA, 19 nt, artificial
  Oligomer
caagggccagaguaucacu

SEQ ID NO: 4162 - RNA, 19 nt, artificial
  Oligomer
gcaucagucuuaaccgaac

SEQ ID NO: 4163 - RNA, 19 nt, artificial
  Oligomer
gaaaccaaagagacccuga

SEQ ID NO: 4164 - RNA, 19 nt, artificial
  Oligomer
cgaggaucacagaagguuc

SEQ ID NO: 4165 - RNA, 19 nt, artificial
  Oligomer
auuguuggauaaaagcaga

SEQ ID NO: 4166 - RNA, 19 nt, artificial
  Oligomer
cucuguauguugcauaaca

SEQ ID NO: 4167 - RNA, 19 nt, artificial
  Oligomer
cauuugaggaaucacugaa

SEQ ID NO: 4168 - RNA, 19 nt, artificial
  Oligomer
cacuguugauuuucauggu

SEQ ID NO: 4169 - RNA, 19 nt, artificial
  Oligomer
caauacucaacacccuguu

SEQ ID NO: 4170 - RNA, 19 nt, artificial
  Oligomer
ucagcuguguuaugccaaa

SEQ ID NO: 4171 - RNA, 19 nt, artificial
  Oligomer
cccuguuggaugacuggaa

SEQ ID NO: 4172 - RNA, 19 nt, artificial
  Oligomer
agaauauuuccuuaccaga

SEQ ID NO: 4173 - RNA, 19 nt, artificial
  Oligomer
ugugguguuacuaucugua

SEQ ID NO: 4174 - RNA, 19 nt, artificial
  Oligomer
ccauauuaccugugguguu

SEQ ID NO: 4175 - RNA, 19 nt, artificial
  Oligomer
ggauugugucuaagcagag

SEQ ID NO: 4176 - RNA, 19 nt, artificial
  Oligomer
cccuucauucaaucuagaa

SEQ ID NO: 4177 - RNA, 19 nt, artificial
  Oligomer
ccaguguaucugcauuaga

SEQ ID NO: 4178 - RNA, 19 nt, artificial
  Oligomer
acagguauauccggagcaa

SEQ ID NO: 4179 - RNA, 19 nt, artificial
  Oligomer
aaagaaggaaugagugcaa

SEQ ID NO: 4180 - RNA, 19 nt, artificial
  Oligomer
gauuuucaaaaccggcaga

SEQ ID NO: 4181 - RNA, 19 nt, artificial
  Oligomer
guuccaagcaggagaacca

SEQ ID NO: 4182 - RNA, 19 nt, artificial
  Oligomer
gguccuuuuggaaguccau

SEQ ID NO: 4183 - RNA, 19 nt, artificial
  Oligomer
uggaugacuggaaaccaua

SEQ ID NO: 4184 - RNA, 19 nt, artificial
  Oligomer
gaggaaaaacaguuggugu

SEQ ID NO: 4185 - RNA, 19 nt, artificial
  Oligomer
aaagcagaacauuccauau

SEQ ID NO: 4186 - RNA, 19 nt, artificial
  Oligomer
aagguuccaagcaggagaa

SEQ ID NO: 4187 - RNA, 19 nt, artificial
  Oligomer
gaguaaccagaacaacuca

SEQ ID NO: 4188 - RNA, 19 nt, artificial
  Oligomer
cugaauucaagacuguuua

SEQ ID NO: 4189 - RNA, 19 nt, artificial
  Oligomer
ugaaacucagcggaaucaa

SEQ ID NO: 4190 - RNA, 19 nt, artificial
  Oligomer
gcuguauaaccaagggcca

SEQ ID NO: 4191 - RNA, 19 nt, artificial
  Oligomer
caugguggauucaagaacu

SEQ ID NO: 4192 - RNA, 19 nt, artificial
  Oligomer
augggauacagaagauaau

SEQ ID NO: 4193 - RNA, 19 nt, artificial
  Oligomer
gcaauuucuaagacuuuga

SEQ ID NO: 4194 - RNA, 19 nt, artificial
  Oligomer
uuugguugaacaaaugcaa

SEQ ID NO: 4195 - RNA, 19 nt, artificial
  Oligomer
cugcagccuuauccuuuua

SEQ ID NO: 4196 - RNA, 19 nt, artificial
  Oligomer
cucucagaauauuuccuua

SEQ ID NO: 4197 - RNA, 19 nt, artificial
  Oligomer
guuagaugcacacuguuga

SEQ ID NO: 4198 - RNA, 19 nt, artificial
  Oligomer
cacagacuuggcuuuggau

SEQ ID NO: 4199 - RNA, 19 nt, artificial
  Oligomer
cauaugggacaagauuuga

SEQ ID NO: 4200 - RNA, 19 nt, artificial
  Oligomer
agcacaaauuugugaagau

SEQ ID NO: 4201 - RNA, 19 nt, artificial
  Oligomer
uuucaugguggauucaaga

SEQ ID NO: 4202 - RNA, 19 nt, artificial
  Oligomer
guucuuaaccucaacugca

SEQ ID NO: 4203 - RNA, 19 nt, artificial
  Oligomer
cacagaagguuccaagcag

SEQ ID NO: 4204 - RNA, 19 nt, artificial
  Oligomer
uggaaauccgaauggucaa

SEQ ID NO: 4205 - RNA, 19 nt, artificial
  Oligomer
augggacaagauuugaaua

SEQ ID NO: 4206 - RNA, 19 nt, artificial
  Oligomer
uaugggacaagauuugaau

SEQ ID NO: 4207 - RNA, 19 nt, artificial
  Oligomer
ccgaaauucugcccuucau

SEQ ID NO: 4208 - RNA, 19 nt, artificial
  Oligomer
aauucugcccuucauucaa

SEQ ID NO: 4209 - RNA, 19 nt, artificial
  Oligomer
ucuacaugcugcugacguu

SEQ ID NO: 4210 - RNA, 19 nt, artificial
  Oligomer
ggaguaacuccauuugcau

SEQ ID NO: 4211 - RNA, 19 nt, artificial
  Oligomer
uacagaagauaauuggaga

SEQ ID NO: 4212 - RNA, 19 nt, artificial
  Oligomer
agaaaacuucucuucacaa

SEQ ID NO: 4213 - RNA, 19 nt, artificial
  Oligomer
acugcagccuuauccuuuu

SEQ ID NO: 4214 - RNA, 19 nt, artificial
  Oligomer
gauucaagaacucccuagu

SEQ ID NO: 4215 - RNA, 19 nt, artificial
  Oligomer
aggagcugaacuugcucaa

SEQ ID NO: 4216 - RNA, 19 nt, artificial
  Oligomer
gaugucauggaaauccgaa

SEQ ID NO: 4217 - RNA, 19 nt, artificial
  Oligomer
agggcugcugaaguaucaa

SEQ ID NO: 4218 - RNA, 19 nt, artificial
  Oligomer
augucaacauccagcugua

SEQ ID NO: 4219 - RNA, 19 nt, artificial
  Oligomer
aaucauccauuuacccuca

SEQ ID NO: 4220 - RNA, 19 nt, artificial
  Oligomer
uguccugcuuuucuggaaa

SEQ ID NO: 4221 - RNA, 19 nt, artificial
  Oligomer
ccuucauucaaucuagaaa

SEQ ID NO: 4222 - RNA, 19 nt, artificial
  Oligomer
gugcuauuccucaugauca

SEQ ID NO: 4223 - RNA, 19 nt, artificial
  Oligomer
cuauccaagacucuucaua

SEQ ID NO: 4224 - RNA, 19 nt, artificial
  Oligomer
gauuguuggauaaaagcag

SEQ ID NO: 4225 - RNA, 19 nt, artificial
  Oligomer
cucagaacauuuucaugaa

SEQ ID NO: 4226 - RNA, 19 nt, artificial
  Oligomer
ucuguauguugcauaacaa

SEQ ID NO: 4227 - RNA, 19 nt, artificial
  Oligomer
accucuucuuugucuucua

SEQ ID NO: 4228 - RNA, 19 nt, artificial
  Oligomer
agcugaacuugcucaaucu

SEQ ID NO: 4229 - RNA, 19 nt, artificial
  Oligomer
ggguucaucuuaaaauagu

SEQ ID NO: 4230 - RNA, 19 nt, artificial
  Oligomer
ugguguuuucuguugugga

SEQ ID NO: 4231 - RNA, 19 nt, artificial
  Oligomer
caucuggcucuccaugaau

SEQ ID NO: 4232 - RNA, 19 nt, artificial
  Oligomer
cggaaucaaucagcugugu

SEQ ID NO: 4233 - RNA, 19 nt, artificial
  Oligomer
aaaaccuucuugcuguaua

SEQ ID NO: 4234 - RNA, 19 nt, artificial
  Oligomer
uaucaugcacugaauucaa

SEQ ID NO: 4235 - RNA, 19 nt, artificial
  Oligomer
acucuuggcuuaccuccga

SEQ ID NO: 4236 - RNA, 19 nt, artificial
  Oligomer
gacuuugaaacucagcgga

SEQ ID NO: 4237 - RNA, 19 nt, artificial
  Oligomer
auccgaauggucaaagaaa

SEQ ID NO: 4238 - RNA, 19 nt, artificial
  Oligomer
uggaggcauuggaguaacu

SEQ ID NO: 4239 - RNA, 19 nt, artificial
  Oligomer
gcuguauauugaugguccu

SEQ ID NO: 4240 - RNA, 19 nt, artificial
  Oligomer
caucuagucaagacuccga

SEQ ID NO: 4241 - RNA, 19 nt, artificial
  Oligomer
cagaagguuccaagcagga

SEQ ID NO: 4242 - RNA, 19 nt, artificial
  Oligomer
gaaggauuuucaaaaccgg

SEQ ID NO: 4243 - RNA, 19 nt, artificial
  Oligomer
ccuagaaaacuucucuuca

SEQ ID NO: 4244 - RNA, 19 nt, artificial
  Oligomer
cugaacuugcucaaucuaa

SEQ ID NO: 4245 - RNA, 19 nt, artificial
  Oligomer
ccaagacucuucauaaacu

SEQ ID NO: 4246 - RNA, 19 nt, artificial
  Oligomer
accagaguauuucucagaa

SEQ ID NO: 4247 - RNA, 19 nt, artificial
  Oligomer
ggcuaggauugugucuaag

SEQ ID NO: 4248 - RNA, 19 nt, artificial
  Oligomer
gccgaaagacuuuacaggu

SEQ ID NO: 4249 - RNA, 19 nt, artificial
  Oligomer
cauuucggucauaagucau

SEQ ID NO: 4250 - RNA, 19 nt, artificial
  Oligomer
cauaagucaucccucagau

SEQ ID NO: 4251 - RNA, 19 nt, artificial
  Oligomer
agaugggauacagaagaua

SEQ ID NO: 4252 - RNA, 19 nt, artificial
  Oligomer
gaaaacuguuagaugcaca

SEQ ID NO: 4253 - RNA, 19 nt, artificial
  Oligomer
gugguguuacuaucuguau

SEQ ID NO: 4254 - RNA, 19 nt, artificial
  Oligomer
cauaaacugaguaaccaga

SEQ ID NO: 4255 - RNA, 19 nt, artificial
  Oligomer
cuacauugucccaguguau

SEQ ID NO: 4256 - RNA, 19 nt, artificial
  Oligomer
uguucaucuggcucuccau

SEQ ID NO: 4257 - RNA, 19 nt, artificial
  Oligomer
aacugaaugcagcaagaua

SEQ ID NO: 4258 - RNA, 19 nt, artificial
  Oligomer
ccucaugaucacagccucu

SEQ ID NO: 4259 - RNA, 19 nt, artificial
  Oligomer
aaaauaguaggagacugga

SEQ ID NO: 4260 - RNA, 19 nt, artificial
  Oligomer
agauuguuggauaaaagca

SEQ ID NO: 4261 - RNA, 19 nt, artificial
  Oligomer
agcaaaauauaacagagga

SEQ ID NO: 4262 - RNA, 19 nt, artificial
  Oligomer
acaugcugcugacguugca

SEQ ID NO: 4263 - RNA, 19 nt, artificial
  Oligomer
acagaagauaauuggagaa

SEQ ID NO: 4264 - RNA, 19 nt, artificial
  Oligomer
gcauuggaguaacuccauu

SEQ ID NO: 4265 - RNA, 19 nt, artificial
  Oligomer
gaugaccgucacauuacau

SEQ ID NO: 4266 - RNA, 19 nt, artificial
  Oligomer
cagucaccaucauuucggu

SEQ ID NO: 4267 - RNA, 19 nt, artificial
  Oligomer
agcaagaccuggucaguau

SEQ ID NO: 4268 - RNA, 19 nt, artificial
  Oligomer
ggcucuccaugaauguccu

SEQ ID NO: 4269 - RNA, 19 nt, artificial
  Oligomer
aaauccgaauggucaaaga

SEQ ID NO: 4270 - RNA, 19 nt, artificial
  Oligomer
uguugaacugaaugcagca

SEQ ID NO: 4271 - RNA, 19 nt, artificial
  Oligomer
guauauccggagcaauaag

SEQ ID NO: 4272 - RNA, 19 nt, artificial
  Oligomer
aagagaacagaccugacua

SEQ ID NO: 4273 - RNA, 19 nt, artificial
  Oligomer
gcaagauaccgagaugagg

SEQ ID NO: 4274 - RNA, 19 nt, artificial
  Oligomer
acucauaugggacaagauu

SEQ ID NO: 4275 - RNA, 19 nt, artificial
  Oligomer
auaucuucugguauacuca

SEQ ID NO: 4276 - RNA, 19 nt, artificial
  Oligomer
gcaauaagaguuucuaacu

SEQ ID NO: 4277 - RNA, 19 nt, artificial
  Oligomer
aaaugugagaauguggcaa

SEQ ID NO: 4278 - RNA, 19 nt, artificial
  Oligomer
gagaauguggcaagaugac

SEQ ID NO: 4279 - RNA, 19 nt, artificial
  Oligomer
ccucaacuucucagugaau

SEQ ID NO: 4280 - RNA, 19 nt, artificial
  Oligomer
auacaagcuuagaagacua

SEQ ID NO: 4281 - RNA, 19 nt, artificial
  Oligomer
cuuuugccaugaagcagga

SEQ ID NO: 4282 - RNA, 19 nt, artificial
  Oligomer
ucguguuccucuuuaaauu

SEQ ID NO: 4283 - RNA, 19 nt, artificial
  Oligomer
accucaacugcagccuuau

SEQ ID NO: 4284 - RNA, 19 nt, artificial
  Oligomer
uuuucaugguggauucaag

SEQ ID NO: 4285 - RNA, 19 nt, artificial
  Oligomer
ucaugcacugaauucaaga

SEQ ID NO: 4286 - RNA, 19 nt, artificial
  Oligomer
cugcaucagucuuaaccga

SEQ ID NO: 4287 - RNA, 19 nt, artificial
  Oligomer
ucacuuuucaguucucaaa

SEQ ID NO: 4288 - RNA, 19 nt, artificial
  Oligomer
gguugaacaaaugcaagau

SEQ ID NO: 4289 - RNA, 19 nt, artificial
  Oligomer
gacucuaaagaaggaauga

SEQ ID NO: 4290 - RNA, 19 nt, artificial
  Oligomer
aggaaugagugcaauuucu

SEQ ID NO: 4291 - RNA, 19 nt, artificial
  Oligomer
auaaaagcagaacauucca

SEQ ID NO: 4292 - RNA, 19 nt, artificial
  Oligomer
cuuuguugaacugaaugca

SEQ ID NO: 4293 - RNA, 19 nt, artificial
  Oligomer
cagaggaaaaacaguuggu

SEQ ID NO: 4294 - RNA, 19 nt, artificial
  Oligomer
ucaccaucauuucggucau

SEQ ID NO: 4295 - RNA, 19 nt, artificial
  Oligomer
cuuuacagguauauccgga

SEQ ID NO: 4296 - RNA, 19 nt, artificial
  Oligomer
ccuuuuacccaugugccga

SEQ ID NO: 4297 - RNA, 19 nt, artificial
  Oligomer
uagaaaacuucucuucaca

SEQ ID NO: 4298 - RNA, 19 nt, artificial
  Oligomer
agaccuggucaguauauua

SEQ ID NO: 4299 - RNA, 19 nt, artificial
  Oligomer
ggaugacuggaaaccauac

SEQ ID NO: 4300 - RNA, 19 nt, artificial
  Oligomer
uggugcuauuccucaugau

SEQ ID NO: 4301 - RNA, 19 nt, artificial
  Oligomer
ucuacauugucccagugua

SEQ ID NO: 4302 - RNA, 19 nt, artificial
  Oligomer
aguuuacccagcacaaauu

SEQ ID NO: 4303 - RNA, 19 nt, artificial
  Oligomer
ccuuccguugguuugcaga

SEQ ID NO: 4304 - RNA, 19 nt, artificial
  Oligomer
ggauuuucaaaaccggcag

SEQ ID NO: 4305 - RNA, 19 nt, artificial
  Oligomer
gaaugcagcaagauaccga

SEQ ID NO: 4306 - RNA, 19 nt, artificial
  Oligomer
acgauuucgagauuuacua

SEQ ID NO: 4307 - RNA, 19 nt, artificial
  Oligomer
ugaacuugcucaaucuaag

SEQ ID NO: 4308 - RNA, 19 nt, artificial
  Oligomer
acagccucuacauaugcaa

SEQ ID NO: 4309 - RNA, 19 nt, artificial
  Oligomer
acaaaugcaagauugaaca

SEQ ID NO: 4310 - RNA, 19 nt, artificial
  Oligomer
cggcugcaucagucuuaac

SEQ ID NO: 4311 - RNA, 19 nt, artificial
  Oligomer
cagccucuacauaugcaau

SEQ ID NO: 4312 - RNA, 19 nt, artificial
  Oligomer
gaacaacucauaugggaca

SEQ ID NO: 4313 - RNA, 19 nt, artificial
  Oligomer
auaaacugaguaaccagaa

SEQ ID NO: 4314 - RNA, 19 nt, artificial
  Oligomer
ggagacuggacagaacgau

SEQ ID NO: 4315 - RNA, 19 nt, artificial
  Oligomer
uuguuggauaaaagcagaa

SEQ ID NO: 4316 - RNA, 19 nt, artificial
  Oligomer
caggacucuaaagaaggaa

SEQ ID NO: 4317 - RNA, 19 nt, artificial
  Oligomer
ggaccuuugugccuguacu

SEQ ID NO: 4318 - RNA, 19 nt, artificial
  Oligomer
aucuggugaaugcccucaa

SEQ ID NO: 4319 - RNA, 19 nt, artificial
  Oligomer
gcagaguuuacccagcaca

SEQ ID NO: 4320 - RNA, 19 nt, artificial
  Oligomer
acuucucagugaauuacag

SEQ ID NO: 4321 - RNA, 19 nt, artificial
  Oligomer
ggagaaaaauaucaugcac

SEQ ID NO: 4322 - RNA, 19 nt, artificial
  Oligomer
gauuuucaugguggauuca

SEQ ID NO: 4323 - RNA, 19 nt, artificial
  Oligomer
ggacccaauucacuaucca

SEQ ID NO: 4324 - RNA, 19 nt, artificial
  Oligomer
cucauaugggacaagauuu

SEQ ID NO: 4325 - RNA, 19 nt, artificial
  Oligomer
guccugcuuuucuggaaaa

SEQ ID NO: 4326 - RNA, 19 nt, artificial
  Oligomer
aggcauuggaguaacucca

SEQ ID NO: 4327 - RNA, 19 nt, artificial
  Oligomer
cugcuuuucuggaaaaccu

SEQ ID NO: 4328 - RNA, 19 nt, artificial
  Oligomer
cuaagacuuugaaacucag

SEQ ID NO: 4329 - RNA, 19 nt, artificial
  Oligomer
agaaggaaugagugcaauu

SEQ ID NO: 4330 - RNA, 19 nt, artificial
  Oligomer
agcaggagaaccaggagau

SEQ ID NO: 4331 - RNA, 19 nt, artificial
  Oligomer
uaccgagaugaggauccua

SEQ ID NO: 4332 - RNA, 19 nt, artificial
  Oligomer
caagcuguauauugauggu

SEQ ID NO: 4333 - RNA, 19 nt, artificial
  Oligomer
gcuauuccucaugaucaca

SEQ ID NO: 4334 - RNA, 19 nt, artificial
  Oligomer
aaccgaaccagcucucaga

SEQ ID NO: 4335 - RNA, 19 nt, artificial
  Oligomer
cagaguaucacuaccucca

SEQ ID NO: 4336 - RNA, 19 nt, artificial
  Oligomer
accaagggccagaguauca

SEQ ID NO: 4337 - RNA, 19 nt, artificial
  Oligomer
caacugcagccuuauccuu

SEQ ID NO: 4338 - RNA, 19 nt, artificial
  Oligomer
uggugguggugcuauuccu

SEQ ID NO: 4339 - RNA, 19 nt, artificial
  Oligomer
ccugaagaauauuugaugu

SEQ ID NO: 4340 - RNA, 19 nt, artificial
  Oligomer
gguaugcagagauauccag

SEQ ID NO: 4341 - RNA, 19 nt, artificial
  Oligomer
ugcuauuccucaugaucac

SEQ ID NO: 4342 - RNA, 19 nt, artificial
  Oligomer
uauugaugguccuuuugga

SEQ ID NO: 4343 - RNA, 19 nt, artificial
  Oligomer
acagaugggauacagaaga

SEQ ID NO: 4344 - RNA, 19 nt, artificial
  Oligomer
ccagaguauuucucagaac

SEQ ID NO: 4345 - RNA, 19 nt, artificial
  Oligomer
uggagaaaaauaucaugca

SEQ ID NO: 4346 - RNA, 19 nt, artificial
  Oligomer
gugguggugcuauuccuca

SEQ ID NO: 4347 - RNA, 19 nt, artificial
  Oligomer
gcccagauuccaagcuaau

SEQ ID NO: 4348 - RNA, 19 nt, artificial
  Oligomer
ucaacuucucagugaauua

SEQ ID NO: 4349 - RNA, 19 nt, artificial
  Oligomer
aagauaccgagaugaggau

SEQ ID NO: 4350 - RNA, 19 nt, artificial
  Oligomer
accgaaccagcucucagaa

SEQ ID NO: 4351 - RNA, 19 nt, artificial
  Oligomer
ccuccaucuagucaagacu

SEQ ID NO: 4352 - RNA, 19 nt, artificial
  Oligomer
ugguugaacaaaugcaaga

SEQ ID NO: 4353 - RNA, 19 nt, artificial
  Oligomer
uuugcagauuuacucugua

SEQ ID NO: 4354 - RNA, 19 nt, artificial
  Oligomer
aauccgaauggucaaagaa

SEQ ID NO: 4355 - RNA, 19 nt, artificial
  Oligomer
aacaaguuuuggcaagaga

SEQ ID NO: 4356 - RNA, 19 nt, artificial
  Oligomer
aucccaagcuguauauuga

SEQ ID NO: 4357 - RNA, 19 nt, artificial
  Oligomer
uaaccagaacaacucauau

SEQ ID NO: 4358 - RNA, 19 nt, artificial
  Oligomer
gaggaaucacugaacuaug

SEQ ID NO: 4359 - RNA, 19 nt, artificial
  Oligomer
cucuucauaaacugaguaa

SEQ ID NO: 4360 - RNA, 19 nt, artificial
  Oligomer
ggauaaaagcagaacauuc

SEQ ID NO: 4361 - RNA, 19 nt, artificial
  Oligomer
ucuagucaagacuccgaaa

SEQ ID NO: 4362 - RNA, 19 nt, artificial
  Oligomer
ggaaucaaucagcuguguu

SEQ ID NO: 4363 - RNA, 19 nt, artificial
  Oligomer
aagaaaacuguuagaugca

SEQ ID NO: 4364 - RNA, 19 nt, artificial
  Oligomer
caucauuucggucauaagu

SEQ ID NO: 4365 - RNA, 19 nt, artificial
  Oligomer
cgaaauucugcccuucauu

SEQ ID NO: 4366 - RNA, 19 nt, artificial
  Oligomer
ccuagugaggagcugaacu

SEQ ID NO: 4367 - RNA, 19 nt, artificial
  Oligomer
uggcaagaugaccgucaca

SEQ ID NO: 4368 - RNA, 19 nt, artificial
  Oligomer
auaacagaggaaaaacagu

SEQ ID NO: 4369 - RNA, 19 nt, artificial
  Oligomer
ugccuguacugugccgaaa

SEQ ID NO: 4370 - RNA, 19 nt, artificial
  Oligomer
ugugccgaaagacuuuaca

SEQ ID NO: 4371 - RNA, 19 nt, artificial
  Oligomer
aagggccagaguaucacua

SEQ ID NO: 4372 - RNA, 19 nt, artificial
  Oligomer
gaucacagaagguuccaag

SEQ ID NO: 4373 - RNA, 19 nt, artificial
  Oligomer
aagcaggagaaccaggaga

SEQ ID NO: 4374 - RNA, 19 nt, artificial
  Oligomer
uggaguaacuccauuugca

SEQ ID NO: 4375 - RNA, 19 nt, artificial
  Oligomer
gcuaauuuuccacagacuu

SEQ ID NO: 4376 - RNA, 19 nt, artificial
  Oligomer
gagugcaauuucuaagacu

SEQ ID NO: 4377 - RNA, 19 nt, artificial
  Oligomer
uguaccucagucaaacaga

SEQ ID NO: 4378 - RNA, 19 nt, artificial
  Oligomer
aggaaaaacaguugguguu

SEQ ID NO: 4379 - RNA, 19 nt, artificial
  Oligomer
cuccaugaauguccugcuu

SEQ ID NO: 4380 - RNA, 19 nt, artificial
  Oligomer
acaagcuuagaagacuaua

SEQ ID NO: 4381 - RNA, 19 nt, artificial
  Oligomer
uuucaggagggcugcugaa

SEQ ID NO: 4382 - RNA, 19 nt, artificial
  Oligomer
cagcaucuguucuuaaccu

SEQ ID NO: 4383 - RNA, 19 nt, artificial
  Oligomer
gauuuacuacugccuccau

SEQ ID NO: 4384 - RNA, 19 nt, artificial
  Oligomer
guauuuucucaggcgugca

SEQ ID NO: 4385 - RNA, 19 nt, artificial
  Oligomer
cagaagauaauuggagaaa

SEQ ID NO: 4386 - RNA, 19 nt, artificial
  Oligomer
aacuucucagugaauuaca

SEQ ID NO: 4387 - RNA, 19 nt, artificial
  Oligomer
aggacucuaaagaaggaau

SEQ ID NO: 4388 - RNA, 19 nt, artificial
  Oligomer
ucuucuuugucuucuacau

SEQ ID NO: 4389 - RNA, 19 nt, artificial
  Oligomer
gaacugaaugcagcaagau

SEQ ID NO: 4390 - RNA, 19 nt, artificial
  Oligomer
cucuaaagaaggaaugagu

SEQ ID NO: 4391 - RNA, 19 nt, artificial
  Oligomer
uccauuuacccucacaaug

SEQ ID NO: 4392 - RNA, 19 nt, artificial
  Oligomer
uaaagagucuuucagcuga

SEQ ID NO: 4393 - RNA, 19 nt, artificial
  Oligomer
gcacaaauuugugaagauu

SEQ ID NO: 4394 - RNA, 19 nt, artificial
  Oligomer
cucauaaccucuucuuugu

SEQ ID NO: 4395 - RNA, 19 nt, artificial
  Oligomer
aauaguaggagacuggaca

SEQ ID NO: 4396 - RNA, 19 nt, artificial
  Oligomer
caaguuuuggcaagagaac

SEQ ID NO: 4397 - RNA, 19 nt, artificial
  Oligomer
gaacgauuucgagauuuac

SEQ ID NO: 4398 - RNA, 19 nt, artificial
  Oligomer
acuguuagaugcacacugu

SEQ ID NO: 4399 - RNA, 19 nt, artificial
  Oligomer
auuccaagcuaauuuucca

SEQ ID NO: 4400 - RNA, 19 nt, artificial
  Oligomer
ugcacacuguugauuuuca

SEQ ID NO: 4401 - RNA, 19 nt, artificial
  Oligomer
cagauuccaagcuaauuuu

SEQ ID NO: 4402 - RNA, 19 nt, artificial
  Oligomer
gaugaggauccuagaaaac

SEQ ID NO: 4403 - RNA, 19 nt, artificial
  Oligomer
cagacuuggcuuuggauuu

SEQ ID NO: 4404 - RNA, 19 nt, artificial
  Oligomer
gacagaacgauuucgagau

SEQ ID NO: 4405 - RNA, 19 nt, artificial
  Oligomer
cagcacaaauuugugaaga

SEQ ID NO: 4406 - RNA, 19 nt, artificial
  Oligomer
cuuaccuccgaggaucaca

SEQ ID NO: 4407 - RNA, 19 nt, artificial
  Oligomer
cugacuaugucaacaucca

SEQ ID NO: 4408 - RNA, 19 nt, artificial
  Oligomer
uaucacuaccuccaccaga

SEQ ID NO: 4409 - RNA, 19 nt, artificial
  Oligomer
gguguuuucuguuguggac

SEQ ID NO: 4410 - RNA, 19 nt, artificial
  Oligomer
ugaauuacagugaagacuu

SEQ ID NO: 4411 - RNA, 19 nt, artificial
  Oligomer
acagugaagacuuuguuga

SEQ ID NO: 4412 - RNA, 19 nt, artificial
  Oligomer
cuggacagaacgauuucga

SEQ ID NO: 4413 - RNA, 19 nt, artificial
  Oligomer
caaaugcaagauugaacaa

SEQ ID NO: 4414 - RNA, 19 nt, artificial
  Oligomer
ucuggugaaugcccucaac

SEQ ID NO: 4415 - RNA, 19 nt, artificial
  Oligomer
aggagaaccaggagauugu

SEQ ID NO: 4416 - RNA, 19 nt, artificial
  Oligomer
agccucuacauaugcaaua

SEQ ID NO: 4417 - RNA, 19 nt, artificial
  Oligomer
ccgaggaucacagaagguu

SEQ ID NO: 4418 - RNA, 19 nt, artificial
  Oligomer
agaguauuucucagaacau

SEQ ID NO: 4419 - RNA, 19 nt, artificial
  Oligomer
ggcauuggaguaacuccau

SEQ ID NO: 4420 - RNA, 19 nt, artificial
  Oligomer
uggugaaugcccucaacuu

SEQ ID NO: 4421 - RNA, 19 nt, artificial
  Oligomer
cugaguaaccagaacaacu

SEQ ID NO: 4422 - RNA, 19 nt, artificial
  Oligomer
cacugaauucaagacuguu

SEQ ID NO: 4423 - RNA, 19 nt, artificial
  Oligomer
acaacuguuccuggccuga

SEQ ID NO: 4424 - RNA, 19 nt, artificial
  Oligomer
ucaugaucacagccucuac

SEQ ID NO: 4425 - RNA, 19 nt, artificial
  Oligomer
aucuucugguauacucaua

SEQ ID NO: 4426 - RNA, 19 nt, artificial
  Oligomer
agugcaauuucuaagacuu

SEQ ID NO: 4427 - RNA, 19 nt, artificial
  Oligomer
gaaaacuucucuucacaac

SEQ ID NO: 4428 - RNA, 19 nt, artificial
  Oligomer
cuaagcagagccucagcau

SEQ ID NO: 4429 - RNA, 19 nt, artificial
  Oligomer
guguuaugccaaagaauag

SEQ ID NO: 4430 - RNA, 19 nt, artificial
  Oligomer
gucccaguguaucugcauu

SEQ ID NO: 4431 - RNA, 19 nt, artificial
  Oligomer
ugauugucguguuccucuu

SEQ ID NO: 4432 - RNA, 19 nt, artificial
  Oligomer
gaaaacuuuugccaugaag

SEQ ID NO: 4433 - RNA, 19 nt, artificial
  Oligomer
ccucgguggaaacuuuugu

SEQ ID NO: 4434 - RNA, 19 nt, artificial
  Oligomer
gaagacuuuguugaacuga

SEQ ID NO: 4435 - RNA, 19 nt, artificial
  Oligomer
acuucucuucacaacuguu

SEQ ID NO: 4436 - RNA, 19 nt, artificial
  Oligomer
gugaagacuuuguugaacu

SEQ ID NO: 4437 - RNA, 19 nt, artificial
  Oligomer
uggacagaacgauuucgag

SEQ ID NO: 4438 - RNA, 19 nt, artificial
  Oligomer
gcaucaauacucaacaccc

SEQ ID NO: 4439 - RNA, 19 nt, artificial
  Oligomer
ucccaagcuguauauugau

SEQ ID NO: 4440 - RNA, 19 nt, artificial
  Oligomer
guuuuggcaagagaacaga

SEQ ID NO: 4441 - RNA, 19 nt, artificial
  Oligomer
gugcaauuucuaagacuuu

SEQ ID NO: 4442 - RNA, 19 nt, artificial
  Oligomer
aagaaggaaugagugcaau

SEQ ID NO: 4443 - RNA, 19 nt, artificial
  Oligomer
aagagucuuucagcugaaa

SEQ ID NO: 4444 - RNA, 19 nt, artificial
  Oligomer
aacaccucugccuguucau

SEQ ID NO: 4445 - RNA, 19 nt, artificial
  Oligomer
cggagcaauaagccaguca

SEQ ID NO: 4446 - RNA, 19 nt, artificial
  Oligomer
gcagauuuacucuguaugu

SEQ ID NO: 4447 - RNA, 19 nt, artificial
  Oligomer
gcuguaccucagucaaaca

SEQ ID NO: 4448 - RNA, 19 nt, artificial
  Oligomer
ggagcaauaagccagucac

SEQ ID NO: 4449 - RNA, 19 nt, artificial
  Oligomer
acuuuauuuggguaugcag

SEQ ID NO: 4450 - RNA, 19 nt, artificial
  Oligomer
agcuaauuuuccacagacu

SEQ ID NO: 4451 - RNA, 19 nt, artificial
  Oligomer
gcugcugaaguaucaaacu

SEQ ID NO: 4452 - RNA, 19 nt, artificial
  Oligomer
gacuauacuuuauuugggu

SEQ ID NO: 4453 - RNA, 19 nt, artificial
  Oligomer
cagcaagauaccgagauga

SEQ ID NO: 4454 - RNA, 19 nt, artificial
  Oligomer
aacugaaaccaaagcaaca

SEQ ID NO: 4455 - RNA, 19 nt, artificial
  Oligomer
uaucuucugguauacucau

SEQ ID NO: 4456 - RNA, 19 nt, artificial
  Oligomer
uacugugccgaaagacuuu

SEQ ID NO: 4457 - RNA, 19 nt, artificial
  Oligomer
cuguuagaugcacacuguu

SEQ ID NO: 4458 - RNA, 19 nt, artificial
  Oligomer
ggugcuauuccucaugauc

SEQ ID NO: 4459 - RNA, 19 nt, artificial
  Oligomer
cuagaaaacuucucuucac

SEQ ID NO: 4460 - RNA, 19 nt, artificial
  Oligomer
aguaaccagaacaacucau

SEQ ID NO: 4461 - RNA, 19 nt, artificial
  Oligomer
ccuuauccuuuuacccaug

SEQ ID NO: 4462 - RNA, 19 nt, artificial
  Oligomer
ggagcugaacuugcucaau

SEQ ID NO: 4463 - RNA, 19 nt, artificial
  Oligomer
gucaguauauuacucuaca

SEQ ID NO: 4464 - RNA, 19 nt, artificial
  Oligomer
guggauucaagaacucccu

SEQ ID NO: 4465 - RNA, 19 nt, artificial
  Oligomer
cuguauguugcauaacaag

SEQ ID NO: 4466 - RNA, 19 nt, artificial
  Oligomer
aaucaaucagcuguguuau

SEQ ID NO: 4467 - RNA, 19 nt, artificial
  Oligomer
agaacauuccauauuaccu

SEQ ID NO: 4468 - RNA, 19 nt, artificial
  Oligomer
gacucuucauaaacugagu

SEQ ID NO: 4469 - RNA, 19 nt, artificial
  Oligomer
agaccugacuaugucaaca

SEQ ID NO: 4470 - RNA, 19 nt, artificial
  Oligomer
accauacaagcuuagaaga

SEQ ID NO: 4471 - RNA, 19 nt, artificial
  Oligomer
cuguucaucuggcucucca

SEQ ID NO: 4472 - RNA, 19 nt, artificial
  Oligomer
gaugacuggaaaccauaca

SEQ ID NO: 4473 - RNA, 19 nt, artificial
  Oligomer
aaaccauacaagcuuagaa

SEQ ID NO: 4474 - RNA, 19 nt, artificial
  Oligomer
accuccgaggaucacagaa

SEQ ID NO: 4475 - RNA, 19 nt, artificial
  Oligomer
guuuacccagcacaaauuu

SEQ ID NO: 4476 - RNA, 19 nt, artificial
  Oligomer
gucguguuccucuuuaaau

SEQ ID NO: 4477 - RNA, 19 nt, artificial
  Oligomer
agccuuauccuuuuaccca

SEQ ID NO: 4478 - RNA, 19 nt, artificial
  Oligomer
agugaauuacagugaagac

SEQ ID NO: 4479 - RNA, 19 nt, artificial
  Oligomer
ugaagcaggacucuaaaga

SEQ ID NO: 4480 - RNA, 19 nt, artificial
  Oligomer
aacucagcggaaucaauca

SEQ ID NO: 4481 - RNA, 19 nt, artificial
  Oligomer
gaacuugcucaaucuaagg

SEQ ID NO: 4482 - RNA, 19 nt, artificial
  Oligomer
cuguuguggacccaauuca

SEQ ID NO: 4483 - RNA, 19 nt, artificial
  Oligomer
cauacaagcuuagaagacu

SEQ ID NO: 4484 - RNA, 19 nt, artificial
  Oligomer
cacagccucuacauaugca

SEQ ID NO: 4485 - RNA, 19 nt, artificial
  Oligomer
ucaacugcagccuuauccu

SEQ ID NO: 4486 - RNA, 19 nt, artificial
  Oligomer
aauuaucccaagcuguaua

SEQ ID NO: 4487 - RNA, 19 nt, artificial
  Oligomer
cuuuuggaaguccauuuga

SEQ ID NO: 4488 - RNA, 19 nt, artificial
  Oligomer
uggauucaagaacucccua

SEQ ID NO: 4489 - RNA, 19 nt, artificial
  Oligomer
gagauuguuggauaaaagc

SEQ ID NO: 4490 - RNA, 19 nt, artificial
  Oligomer
uucccugaaggauuuucaa

SEQ ID NO: 4491 - RNA, 19 nt, artificial
  Oligomer
uuguggacccaauucacua

SEQ ID NO: 4492 - RNA, 19 nt, artificial
  Oligomer
augucauggaaauccgaau

SEQ ID NO: 4493 - RNA, 19 nt, artificial
  Oligomer
agagucuuucagcugaaaa

SEQ ID NO: 4494 - RNA, 19 nt, artificial
  Oligomer
guugguuugcagauuuacu

SEQ ID NO: 4495 - RNA, 19 nt, artificial
  Oligomer
guugaacugaaugcagcaa

SEQ ID NO: 4496 - RNA, 19 nt, artificial
  Oligomer
caugaaccuuucccugaag

SEQ ID NO: 4497 - RNA, 19 nt, artificial
  Oligomer
cugaaaacuuuugccauga

SEQ ID NO: 4498 - RNA, 19 nt, artificial
  Oligomer
guggaaacuuuuguuugau

SEQ ID NO: 4499 - RNA, 19 nt, artificial
  Oligomer
uucacuuuucaguucucaa

SEQ ID NO: 4500 - RNA, 19 nt, artificial
  Oligomer
gaauguccugcuuuucugg

SEQ ID NO: 4501 - RNA, 19 nt, artificial
  Oligomer
aaguuuuggcaagagaaca

SEQ ID NO: 4502 - RNA, 19 nt, artificial
  Oligomer
cuacauaugcaauaagagu

SEQ ID NO: 4503 - RNA, 19 nt, artificial
  Oligomer
cccaguguaucugcauuag

SEQ ID NO: 4504 - RNA, 19 nt, artificial
  Oligomer
ccaucuagucaagacuccg

SEQ ID NO: 4505 - RNA, 19 nt, artificial
  Oligomer
caaucuagaaauuauccca

SEQ ID NO: 4506 - RNA, 19 nt, artificial
  Oligomer
uugugaggguaaauggaug

SEQ ID NO: 4507 - RNA, 19 nt, artificial
  Oligomer
uuuucuaggauccucaucu

SEQ ID NO: 4508 - RNA, 19 nt, artificial
  Oligomer
uucaacaaagucuucacug

SEQ ID NO: 4509 - RNA, 19 nt, artificial
  Oligomer
uuaagacugaugcagccgg

SEQ ID NO: 4510 - RNA, 19 nt, artificial
  Oligomer
uuuagaguccugcuucaug

SEQ ID NO: 4511 - RNA, 19 nt, artificial
  Oligomer
uugugcuggguaaacucug

SEQ ID NO: 4512 - RNA, 19 nt, artificial
  Oligomer
auugugaggguaaauggau

SEQ ID NO: 4513 - RNA, 19 nt, artificial
  Oligomer
ugugaggguaaauggauga

SEQ ID NO: 4514 - RNA, 19 nt, artificial
  Oligomer
uuuccagucauccaacagg

SEQ ID NO: 4515 - RNA, 19 nt, artificial
  Oligomer
uucuaggauccucaucucg

SEQ ID NO: 4516 - RNA, 19 nt, artificial
  Oligomer
uuauugcuccggauauacc

SEQ ID NO: 4517 - RNA, 19 nt, artificial
  Oligomer
cacauugugaggguaaaug

SEQ ID NO: 4518 - RNA, 19 nt, artificial
  Oligomer
uguaaugugacggucaucu

SEQ ID NO: 4519 - RNA, 19 nt, artificial
  Oligomer
ucuaggauccucaucucgg

SEQ ID NO: 4520 - RNA, 19 nt, artificial
  Oligomer
uuucuaaugcagauacacu

SEQ ID NO: 4521 - RNA, 19 nt, artificial
  Oligomer
uuuuauccaacaaucuccu

SEQ ID NO: 4522 - RNA, 19 nt, artificial
  Oligomer
uuggauagugaauuggguc

SEQ ID NO: 4523 - RNA, 19 nt, artificial
  Oligomer
uaaaucugcaaaccaacgg

SEQ ID NO: 4524 - RNA, 19 nt, artificial
  Oligomer
aaaagcaggacauucaugg

SEQ ID NO: 4525 - RNA, 19 nt, artificial
  Oligomer
uggauaucucugcauaccc

SEQ ID NO: 4526 - RNA, 19 nt, artificial
  Oligomer
cuuuuauccaacaaucucc

SEQ ID NO: 4527 - RNA, 19 nt, artificial
  Oligomer
aaugugacggucaucuugc

SEQ ID NO: 4528 - RNA, 19 nt, artificial
  Oligomer
aggguguugaguauugaug

SEQ ID NO: 4529 - RNA, 19 nt, artificial
  Oligomer
uucaguuggacacauugug

SEQ ID NO: 4530 - RNA, 19 nt, artificial
  Oligomer
uugagguuaagaacagaug

SEQ ID NO: 4531 - RNA, 19 nt, artificial
  Oligomer
acauugugaggguaaaugg

SEQ ID NO: 4532 - RNA, 19 nt, artificial
  Oligomer
uaaugugacggucaucuug

SEQ ID NO: 4533 - RNA, 19 nt, artificial
  Oligomer
uuugguuucaguuggacac

SEQ ID NO: 4534 - RNA, 19 nt, artificial
  Oligomer
ugguuauacagcaagaagg

SEQ ID NO: 4535 - RNA, 19 nt, artificial
  Oligomer
uuggaaucugggcucuucc

SEQ ID NO: 4536 - RNA, 19 nt, artificial
  Oligomer
uucaguucaacaaagucuu

SEQ ID NO: 4537 - RNA, 19 nt, artificial
  Oligomer
ucuuucggcacaguacagg

SEQ ID NO: 4538 - RNA, 19 nt, artificial
  Oligomer
uuuccaugacaucugaggg

SEQ ID NO: 4539 - RNA, 19 nt, artificial
  Oligomer
auucaguucaacaaagucu

SEQ ID NO: 4540 - RNA, 19 nt, artificial
  Oligomer
ucaaacaaaaguuuccacc

SEQ ID NO: 4541 - RNA, 19 nt, artificial
  Oligomer
uugcuuugguuucaguugg

SEQ ID NO: 4542 - RNA, 19 nt, artificial
  Oligomer
augaaaaucaacagugugc

SEQ ID NO: 4543 - RNA, 19 nt, artificial
  Oligomer
uauaccuguaaagucuuuc

SEQ ID NO: 4544 - RNA, 19 nt, artificial
  Oligomer
uuuucuaaugcagauacac

SEQ ID NO: 4545 - RNA, 19 nt, artificial
  Oligomer
uccaccaugaaaaucaaca

SEQ ID NO: 4546 - RNA, 19 nt, artificial
  Oligomer
ucuguaucccaucuguuug

SEQ ID NO: 4547 - RNA, 19 nt, artificial
  Oligomer
auuugugcuggguaaacuc

SEQ ID NO: 4548 - RNA, 19 nt, artificial
  Oligomer
uucacugagaaguugaggg

SEQ ID NO: 4549 - RNA, 19 nt, artificial
  Oligomer
uaucccaucuguuugacug

SEQ ID NO: 4550 - RNA, 19 nt, artificial
  Oligomer
ucuuggauagugaauuggg

SEQ ID NO: 4551 - RNA, 19 nt, artificial
  Oligomer
ucaucuugccacauucuca

SEQ ID NO: 4552 - RNA, 19 nt, artificial
  Oligomer
uugaguauugaugcaaaug

SEQ ID NO: 4553 - RNA, 19 nt, artificial
  Oligomer
uuugguuuccagauuaaac

SEQ ID NO: 4554 - RNA, 19 nt, artificial
  Oligomer
uugguuauacagcaagaag

SEQ ID NO: 4555 - RNA, 19 nt, artificial
  Oligomer
uugacugagguacagcugg

SEQ ID NO: 4556 - RNA, 19 nt, artificial
  Oligomer
uuccucuguuauauuuugc

SEQ ID NO: 4557 - RNA, 19 nt, artificial
  Oligomer
uucucuugccaaaacuugu

SEQ ID NO: 4558 - RNA, 19 nt, artificial
  Oligomer
uuaagaacagaugcugagg

SEQ ID NO: 4559 - RNA, 19 nt, artificial
  Oligomer
ugcuuagacacaauccuag

SEQ ID NO: 4560 - RNA, 19 nt, artificial
  Oligomer
uccucaucucgguaucuug

SEQ ID NO: 4561 - RNA, 19 nt, artificial
  Oligomer
uauacugaccaggucuugc

SEQ ID NO: 4562 - RNA, 19 nt, artificial
  Oligomer
ucuccugcuuggaaccuuc

SEQ ID NO: 4563 - RNA, 19 nt, artificial
  Oligomer
auggguaaaaggauaaggc

SEQ ID NO: 4564 - RNA, 19 nt, artificial
  Oligomer
uccugaaacaugcaacguc

SEQ ID NO: 4565 - RNA, 19 nt, artificial
  Oligomer
uuauugcauauguagaggc

SEQ ID NO: 4566 - RNA, 19 nt, artificial
  Oligomer
auucuuuggcauaacacag

SEQ ID NO: 4567 - RNA, 19 nt, artificial
  Oligomer
uuuaugaagagucuuggau

SEQ ID NO: 4568 - RNA, 19 nt, artificial
  Oligomer
uguucugagaaauacucug

SEQ ID NO: 4569 - RNA, 19 nt, artificial
  Oligomer
auuuucuuugaccauucgg

SEQ ID NO: 4570 - RNA, 19 nt, artificial
  Oligomer
uuaugaagagucuuggaua

SEQ ID NO: 4571 - RNA, 19 nt, artificial
  Oligomer
uuacuccaaugccuccagc

SEQ ID NO: 4572 - RNA, 19 nt, artificial
  Oligomer
uucagggucucuuugguuu

SEQ ID NO: 4573 - RNA, 19 nt, artificial
  Oligomer
uaaacauguaaugugacgg

SEQ ID NO: 4574 - RNA, 19 nt, artificial
  Oligomer
ugagguuaagaacagaugc

SEQ ID NO: 4575 - RNA, 19 nt, artificial
  Oligomer
aagaguguucggcacaugg

SEQ ID NO: 4576 - RNA, 19 nt, artificial
  Oligomer
uuccauacaaaucuucaca

SEQ ID NO: 4577 - RNA, 19 nt, artificial
  Oligomer
uuugacugagguacagcug

SEQ ID NO: 4578 - RNA, 19 nt, artificial
  Oligomer
uugccaaaacuuguuaugc

SEQ ID NO: 4579 - RNA, 19 nt, artificial
  Oligomer
aaguuuucuaggauccuca

SEQ ID NO: 4580 - RNA, 19 nt, artificial
  Oligomer
uauguagaggcugugauca

SEQ ID NO: 4581 - RNA, 19 nt, artificial
  Oligomer
ugucaggccaggaacaguu

SEQ ID NO: 4582 - RNA, 19 nt, artificial
  Oligomer
ucugcuuagacacaauccu

SEQ ID NO: 4583 - RNA, 19 nt, artificial
  Oligomer
auuccgcugaguuucaaag

SEQ ID NO: 4584 - RNA, 19 nt, artificial
  Oligomer
ucuagauugaaugaagggc

SEQ ID NO: 4585 - RNA, 19 nt, artificial
  Oligomer
uuuaaagaggaacacgaca

SEQ ID NO: 4586 - RNA, 19 nt, artificial
  Oligomer
uuugauacuucagcagccc

SEQ ID NO: 4587 - RNA, 19 nt, artificial
  Oligomer
ucugcauacccaaauaaag

SEQ ID NO: 4588 - RNA, 19 nt, artificial
  Oligomer
uauugcuccggauauaccu

SEQ ID NO: 4589 - RNA, 19 nt, artificial
  Oligomer
uaucucugcauacccaaau

SEQ ID NO: 4590 - RNA, 19 nt, artificial
  Oligomer
uucacuguaauucacugag

SEQ ID NO: 4591 - RNA, 19 nt, artificial
  Oligomer
ucuucacuguaauucacug

SEQ ID NO: 4592 - RNA, 19 nt, artificial
  Oligomer
uucuguccagucuccuacu

SEQ ID NO: 4593 - RNA, 19 nt, artificial
  Oligomer
ucagugauuccucaaaugg

SEQ ID NO: 4594 - RNA, 19 nt, artificial
  Oligomer
uaagaacagaugcugaggc

SEQ ID NO: 4595 - RNA, 19 nt, artificial
  Oligomer
uugacuagauggaggcagu

SEQ ID NO: 4596 - RNA, 19 nt, artificial
  Oligomer
uuuauccaacaaucuccug

SEQ ID NO: 4597 - RNA, 19 nt, artificial
  Oligomer
uuguucugguuacucaguu

SEQ ID NO: 4598 - RNA, 19 nt, artificial
  Oligomer
ucaaagacugaguggaagc

SEQ ID NO: 4599 - RNA, 19 nt, artificial
  Oligomer
ucucgaaaucguucugucc

SEQ ID NO: 4600 - RNA, 19 nt, artificial
  Oligomer
ucguucuguccagucuccu

SEQ ID NO: 4601 - RNA, 19 nt, artificial
  Oligomer
ucaaauauucuucaggguc

SEQ ID NO: 4602 - RNA, 19 nt, artificial
  Oligomer
uguucugcuuuuauccaac

SEQ ID NO: 4603 - RNA, 19 nt, artificial
  Oligomer
aauguucugagaaauacuc

SEQ ID NO: 4604 - RNA, 19 nt, artificial
  Oligomer
uucggcacauggguaaaag

SEQ ID NO: 4605 - RNA, 19 nt, artificial
  Oligomer
uagaguaauauacugacca

SEQ ID NO: 4606 - RNA, 19 nt, artificial
  Oligomer
uuucaguuggacacauugu

SEQ ID NO: 4607 - RNA, 19 nt, artificial
  Oligomer
aggaacacgacaaucagcc

SEQ ID NO: 4608 - RNA, 19 nt, artificial
  Oligomer
uguagaggcugugaucaug

SEQ ID NO: 4609 - RNA, 19 nt, artificial
  Oligomer
uaccuguaaagucuuucgg

SEQ ID NO: 4610 - RNA, 19 nt, artificial
  Oligomer
uccaacaggguguugagua

SEQ ID NO: 4611 - RNA, 19 nt, artificial
  Oligomer
aaucuccugguucuccugc

SEQ ID NO: 4612 - RNA, 19 nt, artificial
  Oligomer
uuuucuuugaccauucgga

SEQ ID NO: 4613 - RNA, 19 nt, artificial
  Oligomer
auaccuguaaagucuuucg

SEQ ID NO: 4614 - RNA, 19 nt, artificial
  Oligomer
uucagcugaaagacucuuu

SEQ ID NO: 4615 - RNA, 19 nt, artificial
  Oligomer
ugaggcucugcuuagacac

SEQ ID NO: 4616 - RNA, 19 nt, artificial
  Oligomer
ucggauuuccaugacaucu

SEQ ID NO: 4617 - RNA, 19 nt, artificial
  Oligomer
uuaugcaacauacagagua

SEQ ID NO: 4618 - RNA, 19 nt, artificial
  Oligomer
uuaaacauguaaugugacg

SEQ ID NO: 4619 - RNA, 19 nt, artificial
  Oligomer
uuuugaaaauccuucaggg

SEQ ID NO: 4620 - RNA, 19 nt, artificial
  Oligomer
uuggaaccuucugugaucc

SEQ ID NO: 4621 - RNA, 19 nt, artificial
  Oligomer
cuugacuagauggaggcag

SEQ ID NO: 4622 - RNA, 19 nt, artificial
  Oligomer
ucuuauugcauauguagag

SEQ ID NO: 4623 - RNA, 19 nt, artificial
  Oligomer
cuuaugaccgaaaugaugg

SEQ ID NO: 4624 - RNA, 19 nt, artificial
  Oligomer
augaggaauagcaccacca

SEQ ID NO: 4625 - RNA, 19 nt, artificial
  Oligomer
uucaaaucuugucccauau

SEQ ID NO: 4626 - RNA, 19 nt, artificial
  Oligomer
ugccacauucucacauuuc

SEQ ID NO: 4627 - RNA, 19 nt, artificial
  Oligomer
ucuguggaaaauuagcuug

SEQ ID NO: 4628 - RNA, 19 nt, artificial
  Oligomer
uuccgcugaguuucaaagu

SEQ ID NO: 4629 - RNA, 19 nt, artificial
  Oligomer
uuugaccauucggauuucc

SEQ ID NO: 4630 - RNA, 19 nt, artificial
  Oligomer
auugcuccggauauaccug

SEQ ID NO: 4631 - RNA, 19 nt, artificial
  Oligomer
ugaagagucuuggauagug

SEQ ID NO: 4632 - RNA, 19 nt, artificial
  Oligomer
uugguuuccagauuaaaca

SEQ ID NO: 4633 - RNA, 19 nt, artificial
  Oligomer
uuagcuuggaaucugggcu

SEQ ID NO: 4634 - RNA, 19 nt, artificial
  Oligomer
aaaaggaccaucaauauac

SEQ ID NO: 4635 - RNA, 19 nt, artificial
  Oligomer
uuaugaguauaccagaaga

SEQ ID NO: 4636 - RNA, 19 nt, artificial
  Oligomer
ucaaucuugcauuuguuca

SEQ ID NO: 4637 - RNA, 19 nt, artificial
  Oligomer
ugaaacaugcaacgucagc

SEQ ID NO: 4638 - RNA, 19 nt, artificial
  Oligomer
uucauggagagccagauga

SEQ ID NO: 4639 - RNA, 19 nt, artificial
  Oligomer
uccaauuaucuucuguauc

SEQ ID NO: 4640 - RNA, 19 nt, artificial
  Oligomer
uugaugcaaauggaguuac

SEQ ID NO: 4641 - RNA, 19 nt, artificial
  Oligomer
aacaaucuccugguucucc

SEQ ID NO: 4642 - RNA, 19 nt, artificial
  Oligomer
ucaucaaacaaaaguuucc

SEQ ID NO: 4643 - RNA, 19 nt, artificial
  Oligomer
uuaguuugauacuucagca

SEQ ID NO: 4644 - RNA, 19 nt, artificial
  Oligomer
acagauaguaacaccacag

SEQ ID NO: 4645 - RNA, 19 nt, artificial
  Oligomer
uuugugcuggguaaacucu

SEQ ID NO: 4646 - RNA, 19 nt, artificial
  Oligomer
uauugaugcaaauggaguu

SEQ ID NO: 4647 - RNA, 19 nt, artificial
  Oligomer
auaccagaagauaucauag

SEQ ID NO: 4648 - RNA, 19 nt, artificial
  Oligomer
uuaaagaggaacacgacaa

SEQ ID NO: 4649 - RNA, 19 nt, artificial
  Oligomer
uauggaauguucugcuuuu

SEQ ID NO: 4650 - RNA, 19 nt, artificial
  Oligomer
ucuugccacauucucacau

SEQ ID NO: 4651 - RNA, 19 nt, artificial
  Oligomer
ugagaaguugagggcauuc

SEQ ID NO: 4652 - RNA, 19 nt, artificial
  Oligomer
ucuuccauacaaaucuuca

SEQ ID NO: 4653 - RNA, 19 nt, artificial
  Oligomer
aaucguucuguccagucuc

SEQ ID NO: 4654 - RNA, 19 nt, artificial
  Oligomer
aauacagauaguaacacca

SEQ ID NO: 4655 - RNA, 19 nt, artificial
  Oligomer
uucauggcaaaaguuuuca

SEQ ID NO: 4656 - RNA, 19 nt, artificial
  Oligomer
uucacaaauuugugcuggg

SEQ ID NO: 4657 - RNA, 19 nt, artificial
  Oligomer
uccaacaaucuccugguuc

SEQ ID NO: 4658 - RNA, 19 nt, artificial
  Oligomer
ucccauaugaguuguucug

SEQ ID NO: 4659 - RNA, 19 nt, artificial
  Oligomer
aucuugucccauaugaguu

SEQ ID NO: 4660 - RNA, 19 nt, artificial
  Oligomer
ugagggaugacuuaugacc

SEQ ID NO: 4661 - RNA, 19 nt, artificial
  Oligomer
agugauacucuggcccuug

SEQ ID NO: 4662 - RNA, 19 nt, artificial
  Oligomer
guucgguuaagacugaugc

SEQ ID NO: 4663 - RNA, 19 nt, artificial
  Oligomer
ucagggucucuuugguuuc

SEQ ID NO: 4664 - RNA, 19 nt, artificial
  Oligomer
gaaccuucugugauccucg

SEQ ID NO: 4665 - RNA, 19 nt, artificial
  Oligomer
ucugcuuuuauccaacaau

SEQ ID NO: 4666 - RNA, 19 nt, artificial
  Oligomer
uguuaugcaacauacagag

SEQ ID NO: 4667 - RNA, 19 nt, artificial
  Oligomer
uucagugauuccucaaaug

SEQ ID NO: 4668 - RNA, 19 nt, artificial
  Oligomer
accaugaaaaucaacagug

SEQ ID NO: 4669 - RNA, 19 nt, artificial
  Oligomer
aacaggguguugaguauug

SEQ ID NO: 4670 - RNA, 19 nt, artificial
  Oligomer
uuuggcauaacacagcuga

SEQ ID NO: 4671 - RNA, 19 nt, artificial
  Oligomer
uuccagucauccaacaggg

SEQ ID NO: 4672 - RNA, 19 nt, artificial
  Oligomer
ucugguaaggaaauauucu

SEQ ID NO: 4673 - RNA, 19 nt, artificial
  Oligomer
uacagauaguaacaccaca

SEQ ID NO: 4674 - RNA, 19 nt, artificial
  Oligomer
aacaccacagguaauaugg

SEQ ID NO: 4675 - RNA, 19 nt, artificial
  Oligomer
cucugcuuagacacaaucc

SEQ ID NO: 4676 - RNA, 19 nt, artificial
  Oligomer
uucuagauugaaugaaggg

SEQ ID NO: 4677 - RNA, 19 nt, artificial
  Oligomer
ucuaaugcagauacacugg

SEQ ID NO: 4678 - RNA, 19 nt, artificial
  Oligomer
uugcuccggauauaccugu

SEQ ID NO: 4679 - RNA, 19 nt, artificial
  Oligomer
uugcacucauuccuucuuu

SEQ ID NO: 4680 - RNA, 19 nt, artificial
  Oligomer
ucugccgguuuugaaaauc

SEQ ID NO: 4681 - RNA, 19 nt, artificial
  Oligomer
ugguucuccugcuuggaac

SEQ ID NO: 4682 - RNA, 19 nt, artificial
  Oligomer
auggacuuccaaaaggacc

SEQ ID NO: 4683 - RNA, 19 nt, artificial
  Oligomer
uaugguuuccagucaucca

SEQ ID NO: 4684 - RNA, 19 nt, artificial
  Oligomer
acaccaacuguuuuuccuc

SEQ ID NO: 4685 - RNA, 19 nt, artificial
  Oligomer
auauggaauguucugcuuu

SEQ ID NO: 4686 - RNA, 19 nt, artificial
  Oligomer
uucuccugcuuggaaccuu

SEQ ID NO: 4687 - RNA, 19 nt, artificial
  Oligomer
ugaguuguucugguuacuc

SEQ ID NO: 4688 - RNA, 19 nt, artificial
  Oligomer
uaaacagucuugaauucag

SEQ ID NO: 4689 - RNA, 19 nt, artificial
  Oligomer
uugauuccgcugaguuuca

SEQ ID NO: 4690 - RNA, 19 nt, artificial
  Oligomer
uggcccuugguuauacagc

SEQ ID NO: 4691 - RNA, 19 nt, artificial
  Oligomer
aguucuugaauccaccaug

SEQ ID NO: 4692 - RNA, 19 nt, artificial
  Oligomer
auuaucuucuguaucccau

SEQ ID NO: 4693 - RNA, 19 nt, artificial
  Oligomer
ucaaagucuuagaaauugc

SEQ ID NO: 4694 - RNA, 19 nt, artificial
  Oligomer
uugcauuuguucaaccaaa

SEQ ID NO: 4695 - RNA, 19 nt, artificial
  Oligomer
uaaaaggauaaggcugcag

SEQ ID NO: 4696 - RNA, 19 nt, artificial
  Oligomer
uaaggaaauauucugagag

SEQ ID NO: 4697 - RNA, 19 nt, artificial
  Oligomer
ucaacagugugcaucuaac

SEQ ID NO: 4698 - RNA, 19 nt, artificial
  Oligomer
auccaaagccaagucugug

SEQ ID NO: 4699 - RNA, 19 nt, artificial
  Oligomer
ucaaaucuugucccauaug

SEQ ID NO: 4700 - RNA, 19 nt, artificial
  Oligomer
aucuucacaaauuugugcu

SEQ ID NO: 4701 - RNA, 19 nt, artificial
  Oligomer
ucuugaauccaccaugaaa

SEQ ID NO: 4702 - RNA, 19 nt, artificial
  Oligomer
ugcaguugagguuaagaac

SEQ ID NO: 4703 - RNA, 19 nt, artificial
  Oligomer
cugcuuggaaccuucugug

SEQ ID NO: 4704 - RNA, 19 nt, artificial
  Oligomer
uugaccauucggauuucca

SEQ ID NO: 4705 - RNA, 19 nt, artificial
  Oligomer
uauucaaaucuugucccau

SEQ ID NO: 4706 - RNA, 19 nt, artificial
  Oligomer
auucaaaucuugucccaua

SEQ ID NO: 4707 - RNA, 19 nt, artificial
  Oligomer
augaagggcagaauuucgg

SEQ ID NO: 4708 - RNA, 19 nt, artificial
  Oligomer
uugaaugaagggcagaauu

SEQ ID NO: 4709 - RNA, 19 nt, artificial
  Oligomer
aacgucagcagcauguaga

SEQ ID NO: 4710 - RNA, 19 nt, artificial
  Oligomer
augcaaauggaguuacucc

SEQ ID NO: 4711 - RNA, 19 nt, artificial
  Oligomer
ucuccaauuaucuucugua

SEQ ID NO: 4712 - RNA, 19 nt, artificial
  Oligomer
uugugaagagaaguuuucu

SEQ ID NO: 4713 - RNA, 19 nt, artificial
  Oligomer
aaaaggauaaggcugcagu

SEQ ID NO: 4714 - RNA, 19 nt, artificial
  Oligomer
acuagggaguucuugaauc

SEQ ID NO: 4715 - RNA, 19 nt, artificial
  Oligomer
uugagcaaguucagcuccu

SEQ ID NO: 4716 - RNA, 19 nt, artificial
  Oligomer
uucggauuuccaugacauc

SEQ ID NO: 4717 - RNA, 19 nt, artificial
  Oligomer
uugauacuucagcagcccu

SEQ ID NO: 4718 - RNA, 19 nt, artificial
  Oligomer
uacagcuggauguugacau

SEQ ID NO: 4719 - RNA, 19 nt, artificial
  Oligomer
ugaggguaaauggaugauu

SEQ ID NO: 4720 - RNA, 19 nt, artificial
  Oligomer
uuuccagaaaagcaggaca

SEQ ID NO: 4721 - RNA, 19 nt, artificial
  Oligomer
uuucuagauugaaugaagg

SEQ ID NO: 4722 - RNA, 19 nt, artificial
  Oligomer
ugaucaugaggaauagcac

SEQ ID NO: 4723 - RNA, 19 nt, artificial
  Oligomer
uaugaagagucuuggauag

SEQ ID NO: 4724 - RNA, 19 nt, artificial
  Oligomer
cugcuuuuauccaacaauc

SEQ ID NO: 4725 - RNA, 19 nt, artificial
  Oligomer
uucaugaaaauguucugag

SEQ ID NO: 4726 - RNA, 19 nt, artificial
  Oligomer
uuguuaugcaacauacaga

SEQ ID NO: 4727 - RNA, 19 nt, artificial
  Oligomer
uagaagacaaagaagaggu

SEQ ID NO: 4728 - RNA, 19 nt, artificial
  Oligomer
agauugagcaaguucagcu

SEQ ID NO: 4729 - RNA, 19 nt, artificial
  Oligomer
acuauuuuaagaugaaccc

SEQ ID NO: 4730 - RNA, 19 nt, artificial
  Oligomer
uccacaacagaaaacacca

SEQ ID NO: 4731 - RNA, 19 nt, artificial
  Oligomer
auucauggagagccagaug

SEQ ID NO: 4732 - RNA, 19 nt, artificial
  Oligomer
acacagcugauugauuccg

SEQ ID NO: 4733 - RNA, 19 nt, artificial
  Oligomer
uauacagcaagaagguuuu

SEQ ID NO: 4734 - RNA, 19 nt, artificial
  Oligomer
uugaauucagugcaugaua

SEQ ID NO: 4735 - RNA, 19 nt, artificial
  Oligomer
ucggagguaagccaagagu

SEQ ID NO: 4736 - RNA, 19 nt, artificial
  Oligomer
uccgcugaguuucaaaguc

SEQ ID NO: 4737 - RNA, 19 nt, artificial
  Oligomer
uuucuuugaccauucggau

SEQ ID NO: 4738 - RNA, 19 nt, artificial
  Oligomer
aguuacuccaaugccucca

SEQ ID NO: 4739 - RNA, 19 nt, artificial
  Oligomer
aggaccaucaauauacagc

SEQ ID NO: 4740 - RNA, 19 nt, artificial
  Oligomer
ucggagucuugacuagaug

SEQ ID NO: 4741 - RNA, 19 nt, artificial
  Oligomer
uccugcuuggaaccuucug

SEQ ID NO: 4742 - RNA, 19 nt, artificial
  Oligomer
ccgguuuugaaaauccuuc

SEQ ID NO: 4743 - RNA, 19 nt, artificial
  Oligomer
ugaagagaaguuuucuagg

SEQ ID NO: 4744 - RNA, 19 nt, artificial
  Oligomer
uuagauugagcaaguucag

SEQ ID NO: 4745 - RNA, 19 nt, artificial
  Oligomer
aguuuaugaagagucuugg

SEQ ID NO: 4746 - RNA, 19 nt, artificial
  Oligomer
uucugagaaauacucuggu

SEQ ID NO: 4747 - RNA, 19 nt, artificial
  Oligomer
cuuagacacaauccuagcc

SEQ ID NO: 4748 - RNA, 19 nt, artificial
  Oligomer
accuguaaagucuuucggc

SEQ ID NO: 4749 - RNA, 19 nt, artificial
  Oligomer
augacuuaugaccgaaaug

SEQ ID NO: 4750 - RNA, 19 nt, artificial
  Oligomer
aucugagggaugacuuaug

SEQ ID NO: 4751 - RNA, 19 nt, artificial
  Oligomer
uaucuucuguaucccaucu

SEQ ID NO: 4752 - RNA, 19 nt, artificial
  Oligomer
ugugcaucuaacaguuuuc

SEQ ID NO: 4753 - RNA, 19 nt, artificial
  Oligomer
auacagauaguaacaccac

SEQ ID NO: 4754 - RNA, 19 nt, artificial
  Oligomer
ucugguuacucaguuuaug

SEQ ID NO: 4755 - RNA, 19 nt, artificial
  Oligomer
auacacugggacaauguag

SEQ ID NO: 4756 - RNA, 19 nt, artificial
  Oligomer
auggagagccagaugaaca

SEQ ID NO: 4757 - RNA, 19 nt, artificial
  Oligomer
uaucuugcugcauucaguu

SEQ ID NO: 4758 - RNA, 19 nt, artificial
  Oligomer
agaggcugugaucaugagg

SEQ ID NO: 4759 - RNA, 19 nt, artificial
  Oligomer
uccagucuccuacuauuuu

SEQ ID NO: 4760 - RNA, 19 nt, artificial
  Oligomer
ugcuuuuauccaacaaucu

SEQ ID NO: 4761 - RNA, 19 nt, artificial
  Oligomer
uccucuguuauauuuugcu

SEQ ID NO: 4762 - RNA, 19 nt, artificial
  Oligomer
ugcaacgucagcagcaugu

SEQ ID NO: 4763 - RNA, 19 nt, artificial
  Oligomer
uucuccaauuaucuucugu

SEQ ID NO: 4764 - RNA, 19 nt, artificial
  Oligomer
aauggaguuacuccaaugc

SEQ ID NO: 4765 - RNA, 19 nt, artificial
  Oligomer
auguaaugugacggucauc

SEQ ID NO: 4766 - RNA, 19 nt, artificial
  Oligomer
accgaaaugauggugacug

SEQ ID NO: 4767 - RNA, 19 nt, artificial
  Oligomer
auacugaccaggucuugcu

SEQ ID NO: 4768 - RNA, 19 nt, artificial
  Oligomer
aggacauucauggagagcc

SEQ ID NO: 4769 - RNA, 19 nt, artificial
  Oligomer
ucuuugaccauucggauuu

SEQ ID NO: 4770 - RNA, 19 nt, artificial
  Oligomer
ugcugcauucaguucaaca

SEQ ID NO: 4771 - RNA, 19 nt, artificial
  Oligomer
cuuauugcuccggauauac

SEQ ID NO: 4772 - RNA, 19 nt, artificial
  Oligomer
uagucaggucuguucucuu

SEQ ID NO: 4773 - RNA, 19 nt, artificial
  Oligomer
ccucaucucgguaucuugc

SEQ ID NO: 4774 - RNA, 19 nt, artificial
  Oligomer
aaucuugucccauaugagu

SEQ ID NO: 4775 - RNA, 19 nt, artificial
  Oligomer
ugaguauaccagaagauau

SEQ ID NO: 4776 - RNA, 19 nt, artificial
  Oligomer
aguuagaaacucuuauugc

SEQ ID NO: 4777 - RNA, 19 nt, artificial
  Oligomer
uugccacauucucacauuu

SEQ ID NO: 4778 - RNA, 19 nt, artificial
  Oligomer
gucaucuugccacauucuc

SEQ ID NO: 4779 - RNA, 19 nt, artificial
  Oligomer
auucacugagaaguugagg

SEQ ID NO: 4780 - RNA, 19 nt, artificial
  Oligomer
uagucuucuaagcuuguau

SEQ ID NO: 4781 - RNA, 19 nt, artificial
  Oligomer
uccugcuucauggcaaaag

SEQ ID NO: 4782 - RNA, 19 nt, artificial
  Oligomer
aauuuaaagaggaacacga

SEQ ID NO: 4783 - RNA, 19 nt, artificial
  Oligomer
auaaggcugcaguugaggu

SEQ ID NO: 4784 - RNA, 19 nt, artificial
  Oligomer
cuugaauccaccaugaaaa

SEQ ID NO: 4785 - RNA, 19 nt, artificial
  Oligomer
ucuugaauucagugcauga

SEQ ID NO: 4786 - RNA, 19 nt, artificial
  Oligomer
ucgguuaagacugaugcag

SEQ ID NO: 4787 - RNA, 19 nt, artificial
  Oligomer
uuugagaacugaaaaguga

SEQ ID NO: 4788 - RNA, 19 nt, artificial
  Oligomer
aucuugcauuuguucaacc

SEQ ID NO: 4789 - RNA, 19 nt, artificial
  Oligomer
ucauuccuucuuuagaguc

SEQ ID NO: 4790 - RNA, 19 nt, artificial
  Oligomer
agaaauugcacucauuccu

SEQ ID NO: 4791 - RNA, 19 nt, artificial
  Oligomer
uggaauguucugcuuuuau

SEQ ID NO: 4792 - RNA, 19 nt, artificial
  Oligomer
ugcauucaguucaacaaag

SEQ ID NO: 4793 - RNA, 19 nt, artificial
  Oligomer
accaacuguuuuuccucug

SEQ ID NO: 4794 - RNA, 19 nt, artificial
  Oligomer
augaccgaaaugaugguga

SEQ ID NO: 4795 - RNA, 19 nt, artificial
  Oligomer
uccggauauaccuguaaag

SEQ ID NO: 4796 - RNA, 19 nt, artificial
  Oligomer
ucggcacauggguaaaagg

SEQ ID NO: 4797 - RNA, 19 nt, artificial
  Oligomer
ugugaagagaaguuuucua

SEQ ID NO: 4798 - RNA, 19 nt, artificial
  Oligomer
uaauauacugaccaggucu

SEQ ID NO: 4799 - RNA, 19 nt, artificial
  Oligomer
guaugguuuccagucaucc

SEQ ID NO: 4800 - RNA, 19 nt, artificial
  Oligomer
aucaugaggaauagcacca

SEQ ID NO: 4801 - RNA, 19 nt, artificial
  Oligomer
uacacugggacaauguaga

SEQ ID NO: 4802 - RNA, 19 nt, artificial
  Oligomer
aauuugugcuggguaaacu

SEQ ID NO: 4803 - RNA, 19 nt, artificial
  Oligomer
ucugcaaaccaacggaagg

SEQ ID NO: 4804 - RNA, 19 nt, artificial
  Oligomer
cugccgguuuugaaaaucc

SEQ ID NO: 4805 - RNA, 19 nt, artificial
  Oligomer
ucgguaucuugcugcauuc

SEQ ID NO: 4806 - RNA, 19 nt, artificial
  Oligomer
uaguaaaucucgaaaucgu

SEQ ID NO: 4807 - RNA, 19 nt, artificial
  Oligomer
cuuagauugagcaaguuca

SEQ ID NO: 4808 - RNA, 19 nt, artificial
  Oligomer
uugcauauguagaggcugu

SEQ ID NO: 4809 - RNA, 19 nt, artificial
  Oligomer
uguucaaucuugcauuugu

SEQ ID NO: 4810 - RNA, 19 nt, artificial
  Oligomer
guuaagacugaugcagccg

SEQ ID NO: 4811 - RNA, 19 nt, artificial
  Oligomer
auugcauauguagaggcug

SEQ ID NO: 4812 - RNA, 19 nt, artificial
  Oligomer
ugucccauaugaguuguuc

SEQ ID NO: 4813 - RNA, 19 nt, artificial
  Oligomer
uucugguuacucaguuuau

SEQ ID NO: 4814 - RNA, 19 nt, artificial
  Oligomer
aucguucuguccagucucc

SEQ ID NO: 4815 - RNA, 19 nt, artificial
  Oligomer
uucugcuuuuauccaacaa

SEQ ID NO: 4816 - RNA, 19 nt, artificial
  Oligomer
uuccuucuuuagaguccug

SEQ ID NO: 4817 - RNA, 19 nt, artificial
  Oligomer
aguacaggcacaaaggucc

SEQ ID NO: 4818 - RNA, 19 nt, artificial
  Oligomer
uugagggcauucaccagau

SEQ ID NO: 4819 - RNA, 19 nt, artificial
  Oligomer
ugugcuggguaaacucugc

SEQ ID NO: 4820 - RNA, 19 nt, artificial
  Oligomer
cuguaauucacugagaagu

SEQ ID NO: 4821 - RNA, 19 nt, artificial
  Oligomer
gugcaugauauuuuucucc

SEQ ID NO: 4822 - RNA, 19 nt, artificial
  Oligomer
ugaauccaccaugaaaauc

SEQ ID NO: 4823 - RNA, 19 nt, artificial
  Oligomer
uggauagugaauugggucc

SEQ ID NO: 4824 - RNA, 19 nt, artificial
  Oligomer
aaaucuugucccauaugag

SEQ ID NO: 4825 - RNA, 19 nt, artificial
  Oligomer
uuuuccagaaaagcaggac

SEQ ID NO: 4826 - RNA, 19 nt, artificial
  Oligomer
uggaguuacuccaaugccu

SEQ ID NO: 4827 - RNA, 19 nt, artificial
  Oligomer
agguuuuccagaaaagcag

SEQ ID NO: 4828 - RNA, 19 nt, artificial
  Oligomer
cugaguuucaaagucuuag

SEQ ID NO: 4829 - RNA, 19 nt, artificial
  Oligomer
aauugcacucauuccuucu

SEQ ID NO: 4830 - RNA, 19 nt, artificial
  Oligomer
aucuccugguucuccugcu

SEQ ID NO: 4831 - RNA, 19 nt, artificial
  Oligomer
uaggauccucaucucggua

SEQ ID NO: 4832 - RNA, 19 nt, artificial
  Oligomer
accaucaauauacagcuug

SEQ ID NO: 4833 - RNA, 19 nt, artificial
  Oligomer
ugugaucaugaggaauagc

SEQ ID NO: 4834 - RNA, 19 nt, artificial
  Oligomer
ucugagagcugguucgguu

SEQ ID NO: 4835 - RNA, 19 nt, artificial
  Oligomer
uggagguagugauacucug

SEQ ID NO: 4836 - RNA, 19 nt, artificial
  Oligomer
ugauacucuggcccuuggu

SEQ ID NO: 4837 - RNA, 19 nt, artificial
  Oligomer
aaggauaaggcugcaguug

SEQ ID NO: 4838 - RNA, 19 nt, artificial
  Oligomer
aggaauagcaccaccacca

SEQ ID NO: 4839 - RNA, 19 nt, artificial
  Oligomer
acaucaaauauucuucagg

SEQ ID NO: 4840 - RNA, 19 nt, artificial
  Oligomer
cuggauaucucugcauacc

SEQ ID NO: 4841 - RNA, 19 nt, artificial
  Oligomer
gugaucaugaggaauagca

SEQ ID NO: 4842 - RNA, 19 nt, artificial
  Oligomer
uccaaaaggaccaucaaua

SEQ ID NO: 4843 - RNA, 19 nt, artificial
  Oligomer
ucuucuguaucccaucugu

SEQ ID NO: 4844 - RNA, 19 nt, artificial
  Oligomer
guucugagaaauacucugg

SEQ ID NO: 4845 - RNA, 19 nt, artificial
  Oligomer
ugcaugauauuuuucucca

SEQ ID NO: 4846 - RNA, 19 nt, artificial
  Oligomer
ugaggaauagcaccaccac

SEQ ID NO: 4847 - RNA, 19 nt, artificial
  Oligomer
auuagcuuggaaucugggc

SEQ ID NO: 4848 - RNA, 19 nt, artificial
  Oligomer
uaauucacugagaaguuga

SEQ ID NO: 4849 - RNA, 19 nt, artificial
  Oligomer
auccucaucucgguaucuu

SEQ ID NO: 4850 - RNA, 19 nt, artificial
  Oligomer
uucugagagcugguucggu

SEQ ID NO: 4851 - RNA, 19 nt, artificial
  Oligomer
agucuugacuagauggagg

SEQ ID NO: 4852 - RNA, 19 nt, artificial
  Oligomer
ucuugcauuuguucaacca

SEQ ID NO: 4853 - RNA, 19 nt, artificial
  Oligomer
uacagaguaaaucugcaaa

SEQ ID NO: 4854 - RNA, 19 nt, artificial
  Oligomer
uucuuugaccauucggauu

SEQ ID NO: 4855 - RNA, 19 nt, artificial
  Oligomer
ucucuugccaaaacuuguu

SEQ ID NO: 4856 - RNA, 19 nt, artificial
  Oligomer
ucaauauacagcuugggau

SEQ ID NO: 4857 - RNA, 19 nt, artificial
  Oligomer
auaugaguuguucugguua

SEQ ID NO: 4858 - RNA, 19 nt, artificial
  Oligomer
cauaguucagugauuccuc

SEQ ID NO: 4859 - RNA, 19 nt, artificial
  Oligomer
uuacucaguuuaugaagag

SEQ ID NO: 4860 - RNA, 19 nt, artificial
  Oligomer
gaauguucugcuuuuaucc

SEQ ID NO: 4861 - RNA, 19 nt, artificial
  Oligomer
uuucggagucuugacuaga

SEQ ID NO: 4862 - RNA, 19 nt, artificial
  Oligomer
aacacagcugauugauucc

SEQ ID NO: 4863 - RNA, 19 nt, artificial
  Oligomer
ugcaucuaacaguuuucuu

SEQ ID NO: 4864 - RNA, 19 nt, artificial
  Oligomer
acuuaugaccgaaaugaug

SEQ ID NO: 4865 - RNA, 19 nt, artificial
  Oligomer
aaugaagggcagaauuucg

SEQ ID NO: 4866 - RNA, 19 nt, artificial
  Oligomer
aguucagcuccucacuagg

SEQ ID NO: 4867 - RNA, 19 nt, artificial
  Oligomer
ugugacggucaucuugcca

SEQ ID NO: 4868 - RNA, 19 nt, artificial
  Oligomer
acuguuuuuccucuguuau

SEQ ID NO: 4869 - RNA, 19 nt, artificial
  Oligomer
uuucggcacaguacaggca

SEQ ID NO: 4870 - RNA, 19 nt, artificial
  Oligomer
uguaaagucuuucggcaca

SEQ ID NO: 4871 - RNA, 19 nt, artificial
  Oligomer
uagugauacucuggcccuu

SEQ ID NO: 4872 - RNA, 19 nt, artificial
  Oligomer
cuuggaaccuucugugauc

SEQ ID NO: 4873 - RNA, 19 nt, artificial
  Oligomer
ucuccugguucuccugcuu

SEQ ID NO: 4874 - RNA, 19 nt, artificial
  Oligomer
ugcaaauggaguuacucca

SEQ ID NO: 4875 - RNA, 19 nt, artificial
  Oligomer
aagucuguggaaaauuagc

SEQ ID NO: 4876 - RNA, 19 nt, artificial
  Oligomer
agucuuagaaauugcacuc

SEQ ID NO: 4877 - RNA, 19 nt, artificial
  Oligomer
ucuguuugacugagguaca

SEQ ID NO: 4878 - RNA, 19 nt, artificial
  Oligomer
aacaccaacuguuuuuccu

SEQ ID NO: 4879 - RNA, 19 nt, artificial
  Oligomer
aagcaggacauucauggag

SEQ ID NO: 4880 - RNA, 19 nt, artificial
  Oligomer
uauagucuucuaagcuugu

SEQ ID NO: 4881 - RNA, 19 nt, artificial
  Oligomer
uucagcagcccuccugaaa

SEQ ID NO: 4882 - RNA, 19 nt, artificial
  Oligomer
agguuaagaacagaugcug

SEQ ID NO: 4883 - RNA, 19 nt, artificial
  Oligomer
auggaggcaguaguaaauc

SEQ ID NO: 4884 - RNA, 19 nt, artificial
  Oligomer
ugcacgccugagaaaauac

SEQ ID NO: 4885 - RNA, 19 nt, artificial
  Oligomer
uuucuccaauuaucuucug

SEQ ID NO: 4886 - RNA, 19 nt, artificial
  Oligomer
uguaauucacugagaaguu

SEQ ID NO: 4887 - RNA, 19 nt, artificial
  Oligomer
auuccuucuuuagaguccu

SEQ ID NO: 4888 - RNA, 19 nt, artificial
  Oligomer
auguagaagacaaagaaga

SEQ ID NO: 4889 - RNA, 19 nt, artificial
  Oligomer
aucuugcugcauucaguuc

SEQ ID NO: 4890 - RNA, 19 nt, artificial
  Oligomer
acucauuccuucuuuagag

SEQ ID NO: 4891 - RNA, 19 nt, artificial
  Oligomer
cauugugaggguaaaugga

SEQ ID NO: 4892 - RNA, 19 nt, artificial
  Oligomer
ucagcugaaagacucuuua

SEQ ID NO: 4893 - RNA, 19 nt, artificial
  Oligomer
aaucuucacaaauuugugc

SEQ ID NO: 4894 - RNA, 19 nt, artificial
  Oligomer
acaaagaagagguuaugag

SEQ ID NO: 4895 - RNA, 19 nt, artificial
  Oligomer
uguccagucuccuacuauu

SEQ ID NO: 4896 - RNA, 19 nt, artificial
  Oligomer
guucucuugccaaaacuug

SEQ ID NO: 4897 - RNA, 19 nt, artificial
  Oligomer
guaaaucucgaaaucguuc

SEQ ID NO: 4898 - RNA, 19 nt, artificial
  Oligomer
acagugugcaucuaacagu

SEQ ID NO: 4899 - RNA, 19 nt, artificial
  Oligomer
uggaaaauuagcuuggaau

SEQ ID NO: 4900 - RNA, 19 nt, artificial
  Oligomer
ugaaaaucaacagugugca

SEQ ID NO: 4901 - RNA, 19 nt, artificial
  Oligomer
aaaauuagcuuggaaucug

SEQ ID NO: 4902 - RNA, 19 nt, artificial
  Oligomer
guuuucuaggauccucauc

SEQ ID NO: 4903 - RNA, 19 nt, artificial
  Oligomer
aaauccaaagccaagucug

SEQ ID NO: 4904 - RNA, 19 nt, artificial
  Oligomer
aucucgaaaucguucuguc

SEQ ID NO: 4905 - RNA, 19 nt, artificial
  Oligomer
ucuucacaaauuugugcug

SEQ ID NO: 4906 - RNA, 19 nt, artificial
  Oligomer
ugugauccucggagguaag

SEQ ID NO: 4907 - RNA, 19 nt, artificial
  Oligomer
uggauguugacauagucag

SEQ ID NO: 4908 - RNA, 19 nt, artificial
  Oligomer
ucugguggagguagugaua

SEQ ID NO: 4909 - RNA, 19 nt, artificial
  Oligomer
guccacaacagaaaacacc

SEQ ID NO: 4910 - RNA, 19 nt, artificial
  Oligomer
aagucuucacuguaauuca

SEQ ID NO: 4911 - RNA, 19 nt, artificial
  Oligomer
ucaacaaagucuucacugu

SEQ ID NO: 4912 - RNA, 19 nt, artificial
  Oligomer
ucgaaaucguucuguccag

SEQ ID NO: 4913 - RNA, 19 nt, artificial
  Oligomer
uuguucaaucuugcauuug

SEQ ID NO: 4914 - RNA, 19 nt, artificial
  Oligomer
guugagggcauucaccaga

SEQ ID NO: 4915 - RNA, 19 nt, artificial
  Oligomer
acaaucuccugguucuccu

SEQ ID NO: 4916 - RNA, 19 nt, artificial
  Oligomer
uauugcauauguagaggcu

SEQ ID NO: 4917 - RNA, 19 nt, artificial
  Oligomer
aaccuucugugauccucgg

SEQ ID NO: 4918 - RNA, 19 nt, artificial
  Oligomer
auguucugagaaauacucu

SEQ ID NO: 4919 - RNA, 19 nt, artificial
  Oligomer
auggaguuacuccaaugcc

SEQ ID NO: 4920 - RNA, 19 nt, artificial
  Oligomer
aaguugagggcauucacca

SEQ ID NO: 4921 - RNA, 19 nt, artificial
  Oligomer
aguuguucugguuacucag

SEQ ID NO: 4922 - RNA, 19 nt, artificial
  Oligomer
aacagucuugaauucagug

SEQ ID NO: 4923 - RNA, 19 nt, artificial
  Oligomer
ucaggccaggaacaguugu

SEQ ID NO: 4924 - RNA, 19 nt, artificial
  Oligomer
guagaggcugugaucauga

SEQ ID NO: 4925 - RNA, 19 nt, artificial
  Oligomer
uaugaguauaccagaagau

SEQ ID NO: 4926 - RNA, 19 nt, artificial
  Oligomer
aagucuuagaaauugcacu

SEQ ID NO: 4927 - RNA, 19 nt, artificial
  Oligomer
guugugaagagaaguuuuc

SEQ ID NO: 4928 - RNA, 19 nt, artificial
  Oligomer
augcugaggcucugcuuag

SEQ ID NO: 4929 - RNA, 19 nt, artificial
  Oligomer
cuauucuuuggcauaacac

SEQ ID NO: 4930 - RNA, 19 nt, artificial
  Oligomer
aaugcagauacacugggac

SEQ ID NO: 4931 - RNA, 19 nt, artificial
  Oligomer
aagaggaacacgacaauca

SEQ ID NO: 4932 - RNA, 19 nt, artificial
  Oligomer
cuucauggcaaaaguuuuc

SEQ ID NO: 4933 - RNA, 19 nt, artificial
  Oligomer
acaaaaguuuccaccgagg

SEQ ID NO: 4934 - RNA, 19 nt, artificial
  Oligomer
ucaguucaacaaagucuuc

SEQ ID NO: 4935 - RNA, 19 nt, artificial
  Oligomer
aacaguugugaagagaagu

SEQ ID NO: 4936 - RNA, 19 nt, artificial
  Oligomer
aguucaacaaagucuucac

SEQ ID NO: 4937 - RNA, 19 nt, artificial
  Oligomer
cucgaaaucguucugucca

SEQ ID NO: 4938 - RNA, 19 nt, artificial
  Oligomer
ggguguugaguauugaugc

SEQ ID NO: 4939 - RNA, 19 nt, artificial
  Oligomer
aucaauauacagcuuggga

SEQ ID NO: 4940 - RNA, 19 nt, artificial
  Oligomer
ucuguucucuugccaaaac

SEQ ID NO: 4941 - RNA, 19 nt, artificial
  Oligomer
aaagucuuagaaauugcac

SEQ ID NO: 4942 - RNA, 19 nt, artificial
  Oligomer
auugcacucauuccuucuu

SEQ ID NO: 4943 - RNA, 19 nt, artificial
  Oligomer
uuucagcugaaagacucuu

SEQ ID NO: 4944 - RNA, 19 nt, artificial
  Oligomer
augaacaggcagagguguu

SEQ ID NO: 4945 - RNA, 19 nt, artificial
  Oligomer
ugacuggcuuauugcuccg

SEQ ID NO: 4946 - RNA, 19 nt, artificial
  Oligomer
acauacagaguaaaucugc

SEQ ID NO: 4947 - RNA, 19 nt, artificial
  Oligomer
uguuugacugagguacagc

SEQ ID NO: 4948 - RNA, 19 nt, artificial
  Oligomer
gugacuggcuuauugcucc

SEQ ID NO: 4949 - RNA, 19 nt, artificial
  Oligomer
cugcauacccaaauaaagu

SEQ ID NO: 4950 - RNA, 19 nt, artificial
  Oligomer
agucuguggaaaauuagcu

SEQ ID NO: 4951 - RNA, 19 nt, artificial
  Oligomer
aguuugauacuucagcagc

SEQ ID NO: 4952 - RNA, 19 nt, artificial
  Oligomer
acccaaauaaaguauaguc

SEQ ID NO: 4953 - RNA, 19 nt, artificial
  Oligomer
ucaucucgguaucuugcug

SEQ ID NO: 4954 - RNA, 19 nt, artificial
  Oligomer
uguugcuuugguuucaguu

SEQ ID NO: 4955 - RNA, 19 nt, artificial
  Oligomer
augaguauaccagaagaua

SEQ ID NO: 4956 - RNA, 19 nt, artificial
  Oligomer
aaagucuuucggcacagua

SEQ ID NO: 4957 - RNA, 19 nt, artificial
  Oligomer
aacagugugcaucuaacag

SEQ ID NO: 4958 - RNA, 19 nt, artificial
  Oligomer
gaucaugaggaauagcacc

SEQ ID NO: 4959 - RNA, 19 nt, artificial
  Oligomer
gugaagagaaguuuucuag

SEQ ID NO: 4960 - RNA, 19 nt, artificial
  Oligomer
augaguuguucugguuacu

SEQ ID NO: 4961 - RNA, 19 nt, artificial
  Oligomer
cauggguaaaaggauaagg

SEQ ID NO: 4962 - RNA, 19 nt, artificial
  Oligomer
auugagcaaguucagcucc

SEQ ID NO: 4963 - RNA, 19 nt, artificial
  Oligomer
uguagaguaauauacugac

SEQ ID NO: 4964 - RNA, 19 nt, artificial
  Oligomer
agggaguucuugaauccac

SEQ ID NO: 4965 - RNA, 19 nt, artificial
  Oligomer
cuuguuaugcaacauacag

SEQ ID NO: 4966 - RNA, 19 nt, artificial
  Oligomer
auaacacagcugauugauu

SEQ ID NO: 4967 - RNA, 19 nt, artificial
  Oligomer
agguaauauggaauguucu

SEQ ID NO: 4968 - RNA, 19 nt, artificial
  Oligomer
acucaguuuaugaagaguc

SEQ ID NO: 4969 - RNA, 19 nt, artificial
  Oligomer
uguugacauagucaggucu

SEQ ID NO: 4970 - RNA, 19 nt, artificial
  Oligomer
ucuucuaagcuuguauggu

SEQ ID NO: 4971 - RNA, 19 nt, artificial
  Oligomer
uggagagccagaugaacag

SEQ ID NO: 4972 - RNA, 19 nt, artificial
  Oligomer
uguaugguuuccagucauc

SEQ ID NO: 4973 - RNA, 19 nt, artificial
  Oligomer
uucuaagcuuguaugguuu

SEQ ID NO: 4974 - RNA, 19 nt, artificial
  Oligomer
uucugugauccucggaggu

SEQ ID NO: 4975 - RNA, 19 nt, artificial
  Oligomer
aaauuugugcuggguaaac

SEQ ID NO: 4976 - RNA, 19 nt, artificial
  Oligomer
auuuaaagaggaacacgac

SEQ ID NO: 4977 - RNA, 19 nt, artificial
  Oligomer
uggguaaaaggauaaggcu

SEQ ID NO: 4978 - RNA, 19 nt, artificial
  Oligomer
gucuucacuguaauucacu

SEQ ID NO: 4979 - RNA, 19 nt, artificial
  Oligomer
ucuuuagaguccugcuuca

SEQ ID NO: 4980 - RNA, 19 nt, artificial
  Oligomer
ugauugauuccgcugaguu

SEQ ID NO: 4981 - RNA, 19 nt, artificial
  Oligomer
ccuuagauugagcaaguuc

SEQ ID NO: 4982 - RNA, 19 nt, artificial
  Oligomer
ugaauuggguccacaacag

SEQ ID NO: 4983 - RNA, 19 nt, artificial
  Oligomer
agucuucuaagcuuguaug

SEQ ID NO: 4984 - RNA, 19 nt, artificial
  Oligomer
ugcauauguagaggcugug

SEQ ID NO: 4985 - RNA, 19 nt, artificial
  Oligomer
aggauaaggcugcaguuga

SEQ ID NO: 4986 - RNA, 19 nt, artificial
  Oligomer
uauacagcuugggauaauu

SEQ ID NO: 4987 - RNA, 19 nt, artificial
  Oligomer
ucaaauggacuuccaaaag

SEQ ID NO: 4988 - RNA, 19 nt, artificial
  Oligomer
uagggaguucuugaaucca

SEQ ID NO: 4989 - RNA, 19 nt, artificial
  Oligomer
gcuuuuauccaacaaucuc

SEQ ID NO: 4990 - RNA, 19 nt, artificial
  Oligomer
uugaaaauccuucagggaa

SEQ ID NO: 4991 - RNA, 19 nt, artificial
  Oligomer
uagugaauuggguccacaa

SEQ ID NO: 4992 - RNA, 19 nt, artificial
  Oligomer
auucggauuuccaugacau

SEQ ID NO: 4993 - RNA, 19 nt, artificial
  Oligomer
uuuucagcugaaagacucu

SEQ ID NO: 4994 - RNA, 19 nt, artificial
  Oligomer
aguaaaucugcaaaccaac

SEQ ID NO: 4995 - RNA, 19 nt, artificial
  Oligomer
uugcugcauucaguucaac

SEQ ID NO: 4996 - RNA, 19 nt, artificial
  Oligomer
cuucagggaaagguucaug

SEQ ID NO: 4997 - RNA, 19 nt, artificial
  Oligomer
ucauggcaaaaguuuucag

SEQ ID NO: 4998 - RNA, 19 nt, artificial
  Oligomer
aucaaacaaaaguuuccac

SEQ ID NO: 4999 - RNA, 19 nt, artificial
  Oligomer
uugagaacugaaaagugaa

SEQ ID NO: 5000 - RNA, 19 nt, artificial
  Oligomer
ccagaaaagcaggacauuc

SEQ ID NO: 5001 - RNA, 19 nt, artificial
  Oligomer
uguucucuugccaaaacuu

SEQ ID NO: 5002 - RNA, 19 nt, artificial
  Oligomer
acucuuauugcauauguag

SEQ ID NO: 5003 - RNA, 19 nt, artificial
  Oligomer
cuaaugcagauacacuggg

SEQ ID NO: 5004 - RNA, 19 nt, artificial
  Oligomer
cggagucuugacuagaugg

SEQ ID NO: 5005 - RNA, 19 nt, artificial
  Oligomer
ugggauaauuucuagauug

SEQ ID NO: 5006 - RNA, 19 nt, artificial
  Oligomer
acuuuguacuccaggcuca

SEQ ID NO: 5007 - RNA, 19 nt, artificial
  Oligomer
cagccugcaagaauucaaa

SEQ ID NO: 5008 - RNA, 19 nt, artificial
  Oligomer
cuauuugacuccgauagaa

SEQ ID NO: 5009 - RNA, 19 nt, artificial
  Oligomer
ugugcaucauggaagucaa

SEQ ID NO: 5010 - RNA, 19 nt, artificial
  Oligomer
cuuuguacuccaggcucag

SEQ ID NO: 5011 - RNA, 19 nt, artificial
  Oligomer
ccuauuugacuccgauaga

SEQ ID NO: 5012 - RNA, 19 nt, artificial
  Oligomer
ggacaaacaggcuguauga

SEQ ID NO: 5013 - RNA, 19 nt, artificial
  Oligomer
cagucauguuguaucugga

SEQ ID NO: 5014 - RNA, 19 nt, artificial
  Oligomer
ggagaaacacaaauucugu

SEQ ID NO: 5015 - RNA, 19 nt, artificial
  Oligomer
ggcuguaugaguccuucaa

SEQ ID NO: 5016 - RNA, 19 nt, artificial
  Oligomer
ggccaacaaggagaagaaa

SEQ ID NO: 5017 - RNA, 19 nt, artificial
  Oligomer
cagugcuccugagcagaaa

SEQ ID NO: 5018 - RNA, 19 nt, artificial
  Oligomer
gaacuuuguacuccaggcu

SEQ ID NO: 5019 - RNA, 19 nt, artificial
  Oligomer
cugugaacuuuguacucca

SEQ ID NO: 5020 - RNA, 19 nt, artificial
  Oligomer
cugagauacuuuuggagaa

SEQ ID NO: 5021 - RNA, 19 nt, artificial
  Oligomer
ccgugugcaucauggaagu

SEQ ID NO: 5022 - RNA, 19 nt, artificial
  Oligomer
ucauguacaggcaccagaa

SEQ ID NO: 5023 - RNA, 19 nt, artificial
  Oligomer
cauguacaggcaccagaaa

SEQ ID NO: 5024 - RNA, 19 nt, artificial
  Oligomer
acaggcaccagaaaagaaa

SEQ ID NO: 5025 - RNA, 19 nt, artificial
  Oligomer
cccuuuuuuucacuauaga

SEQ ID NO: 5026 - RNA, 19 nt, artificial
  Oligomer
acuuuuggagaaacacaaa

SEQ ID NO: 5027 - RNA, 19 nt, artificial
  Oligomer
gcccuauuugacuccgaua

SEQ ID NO: 5028 - RNA, 19 nt, artificial
  Oligomer
aggagugugacaaugagaa

SEQ ID NO: 5029 - RNA, 19 nt, artificial
  Oligomer
gguucuaagaggcugucga

SEQ ID NO: 5030 - RNA, 19 nt, artificial
  Oligomer
gaggagugugacaaugaga

SEQ ID NO: 5031 - RNA, 19 nt, artificial
  Oligomer
gaaucuuguuuuuccugga

SEQ ID NO: 5032 - RNA, 19 nt, artificial
  Oligomer
uggccaacaaggagaagaa

SEQ ID NO: 5033 - RNA, 19 nt, artificial
  Oligomer
ugggcaagaaugacaugaa

SEQ ID NO: 5034 - RNA, 19 nt, artificial
  Oligomer
gagaaacacaaauucugua

SEQ ID NO: 5035 - RNA, 19 nt, artificial
  Oligomer
gacacuaucuggcugcaca

SEQ ID NO: 5036 - RNA, 19 nt, artificial
  Oligomer
gcaguuuaagaccauugca

SEQ ID NO: 5037 - RNA, 19 nt, artificial
  Oligomer
gauucuuugcccuauuuga

SEQ ID NO: 5038 - RNA, 19 nt, artificial
  Oligomer
uacuuuuggagaaacacaa

SEQ ID NO: 5039 - RNA, 19 nt, artificial
  Oligomer
ucuuguuuuuccuggagaa

SEQ ID NO: 5040 - RNA, 19 nt, artificial
  Oligomer
agauacuuuuggagaaaca

SEQ ID NO: 5041 - RNA, 19 nt, artificial
  Oligomer
agucauguuguaucuggaa

SEQ ID NO: 5042 - RNA, 19 nt, artificial
  Oligomer
gccacuuugagguguucua

SEQ ID NO: 5043 - RNA, 19 nt, artificial
  Oligomer
uggacuuuaucuggaucaa

SEQ ID NO: 5044 - RNA, 19 nt, artificial
  Oligomer
cacugggcaagaaugacau

SEQ ID NO: 5045 - RNA, 19 nt, artificial
  Oligomer
agaguaucauguacaggca

SEQ ID NO: 5046 - RNA, 19 nt, artificial
  Oligomer
aagacaacaugaagcucca

SEQ ID NO: 5047 - RNA, 19 nt, artificial
  Oligomer
ggcuuauccgaggucucaa

SEQ ID NO: 5048 - RNA, 19 nt, artificial
  Oligomer
gaagguguccaagacaaca

SEQ ID NO: 5049 - RNA, 19 nt, artificial
  Oligomer
agguggacuuuaucuggau

SEQ ID NO: 5050 - RNA, 19 nt, artificial
  Oligomer
ugcccuauuugacuccgau

SEQ ID NO: 5051 - RNA, 19 nt, artificial
  Oligomer
ugagaaguucggcuucaga

SEQ ID NO: 5052 - RNA, 19 nt, artificial
  Oligomer
gcuucugcucaucuuucau

SEQ ID NO: 5053 - RNA, 19 nt, artificial
  Oligomer
cgaagguguccaagacaac

SEQ ID NO: 5054 - RNA, 19 nt, artificial
  Oligomer
agagucaaaggucguccaa

SEQ ID NO: 5055 - RNA, 19 nt, artificial
  Oligomer
gugccuggaaucuuguuuu

SEQ ID NO: 5056 - RNA, 19 nt, artificial
  Oligomer
aguccuucaaggcaucaga

SEQ ID NO: 5057 - RNA, 19 nt, artificial
  Oligomer
gcuucagauuuuuccaaga

SEQ ID NO: 5058 - RNA, 19 nt, artificial
  Oligomer
aagcagcucugcaugugaa

SEQ ID NO: 5059 - RNA, 19 nt, artificial
  Oligomer
acaucaagugcuacaucga

SEQ ID NO: 5060 - RNA, 19 nt, artificial
  Oligomer
gacaaugagaaagagucaa

SEQ ID NO: 5061 - RNA, 19 nt, artificial
  Oligomer
ucagccugcaagaauucaa

SEQ ID NO: 5062 - RNA, 19 nt, artificial
  Oligomer
caccagaaaagaaagcaua

SEQ ID NO: 5063 - RNA, 19 nt, artificial
  Oligomer
acacuaucuggcugcacau

SEQ ID NO: 5064 - RNA, 19 nt, artificial
  Oligomer
ccuucuuugcagagcgauu

SEQ ID NO: 5065 - RNA, 19 nt, artificial
  Oligomer
gagaaguucggcuucagau

SEQ ID NO: 5066 - RNA, 19 nt, artificial
  Oligomer
ucagauuuuuccaagagaa

SEQ ID NO: 5067 - RNA, 19 nt, artificial
  Oligomer
ccuggagcugcauauguac

SEQ ID NO: 5068 - RNA, 19 nt, artificial
  Oligomer
ggugccuggaaucuuguuu

SEQ ID NO: 5069 - RNA, 19 nt, artificial
  Oligomer
caggcaccagaaaagaaag

SEQ ID NO: 5070 - RNA, 19 nt, artificial
  Oligomer
gcaccagaaaagaaagcau

SEQ ID NO: 5071 - RNA, 19 nt, artificial
  Oligomer
gcuccugagcagaaagaca

SEQ ID NO: 5072 - RNA, 19 nt, artificial
  Oligomer
agcagcucugcaugugaaa

SEQ ID NO: 5073 - RNA, 19 nt, artificial
  Oligomer
cuggaucgaagguguccaa

SEQ ID NO: 5074 - RNA, 19 nt, artificial
  Oligomer
ugccuggaaucuuguuuuu

SEQ ID NO: 5075 - RNA, 19 nt, artificial
  Oligomer
guacaggcaccagaaaaga

SEQ ID NO: 5076 - RNA, 19 nt, artificial
  Oligomer
cgugguucuaagaggcugu

SEQ ID NO: 5077 - RNA, 19 nt, artificial
  Oligomer
cuaccacuggaccagaaca

SEQ ID NO: 5078 - RNA, 19 nt, artificial
  Oligomer
uacaggcaccagaaaagaa

SEQ ID NO: 5079 - RNA, 19 nt, artificial
  Oligomer
guaugacaucgaugugugu

SEQ ID NO: 5080 - RNA, 19 nt, artificial
  Oligomer
gcaagaauucaaagcagcu

SEQ ID NO: 5081 - RNA, 19 nt, artificial
  Oligomer
uuaucuggaucaacagaga

SEQ ID NO: 5082 - RNA, 19 nt, artificial
  Oligomer
ugcuccuccucauguucau

SEQ ID NO: 5083 - RNA, 19 nt, artificial
  Oligomer
gcuacaucgaugggccuua

SEQ ID NO: 5084 - RNA, 19 nt, artificial
  Oligomer
agaagaagggcaaggugca

SEQ ID NO: 5085 - RNA, 19 nt, artificial
  Oligomer
ccaagggcucugagauacu

SEQ ID NO: 5086 - RNA, 19 nt, artificial
  Oligomer
gcugcauauguacaugaca

SEQ ID NO: 5087 - RNA, 19 nt, artificial
  Oligomer
gguguccaagacaacauga

SEQ ID NO: 5088 - RNA, 19 nt, artificial
  Oligomer
aacucaaauuccucuucca

SEQ ID NO: 5089 - RNA, 19 nt, artificial
  Oligomer
cuggaaucuuguuuuuccu

SEQ ID NO: 5090 - RNA, 19 nt, artificial
  Oligomer
gccugcugacuaaacugga

SEQ ID NO: 5091 - RNA, 19 nt, artificial
  Oligomer
ccugcugacuaaacuggag

SEQ ID NO: 5092 - RNA, 19 nt, artificial
  Oligomer
caaugagaaagagucaaag

SEQ ID NO: 5093 - RNA, 19 nt, artificial
  Oligomer
gcuuccauucugcagagua

SEQ ID NO: 5094 - RNA, 19 nt, artificial
  Oligomer
ggcuucugcucaucuuuca

SEQ ID NO: 5095 - RNA, 19 nt, artificial
  Oligomer
ugggugacucagcaguuua

SEQ ID NO: 5096 - RNA, 19 nt, artificial
  Oligomer
cugacuggagcaagguguu

SEQ ID NO: 5097 - RNA, 19 nt, artificial
  Oligomer
aguggacaaacaggcugua

SEQ ID NO: 5098 - RNA, 19 nt, artificial
  Oligomer
ccaccauugcucgcuauga

SEQ ID NO: 5099 - RNA, 19 nt, artificial
  Oligomer
agaccauugcaggagaaga

SEQ ID NO: 5100 - RNA, 19 nt, artificial
  Oligomer
cagauuuuuccaagagaau

SEQ ID NO: 5101 - RNA, 19 nt, artificial
  Oligomer
gcuuauccgaggucucaau

SEQ ID NO: 5102 - RNA, 19 nt, artificial
  Oligomer
cggcuucagauuuuuccaa

SEQ ID NO: 5103 - RNA, 19 nt, artificial
  Oligomer
caggcugguaugcagucau

SEQ ID NO: 5104 - RNA, 19 nt, artificial
  Oligomer
ggaucuuugccucugagca

SEQ ID NO: 5105 - RNA, 19 nt, artificial
  Oligomer
cccuauuugacuccgauag

SEQ ID NO: 5106 - RNA, 19 nt, artificial
  Oligomer
ccaaggucacucaucuccu

SEQ ID NO: 5107 - RNA, 19 nt, artificial
  Oligomer
aaguggcugcugagaagaa

SEQ ID NO: 5108 - RNA, 19 nt, artificial
  Oligomer
ucgaagguguccaagacaa

SEQ ID NO: 5109 - RNA, 19 nt, artificial
  Oligomer
ugucgaggagugugacaau

SEQ ID NO: 5110 - RNA, 19 nt, artificial
  Oligomer
ggagucauggagaaccuga

SEQ ID NO: 5111 - RNA, 19 nt, artificial
  Oligomer
ugcugaagggccauuguga

SEQ ID NO: 5112 - RNA, 19 nt, artificial
  Oligomer
agaccuggugacuacuugu

SEQ ID NO: 5113 - RNA, 19 nt, artificial
  Oligomer
cugcugagaagaagggcaa

SEQ ID NO: 5114 - RNA, 19 nt, artificial
  Oligomer
cucagcaguuuaagaccau

SEQ ID NO: 5115 - RNA, 19 nt, artificial
  Oligomer
agccgugugcaucauggaa

SEQ ID NO: 5116 - RNA, 19 nt, artificial
  Oligomer
aacuuuguacuccaggcuc

SEQ ID NO: 5117 - RNA, 19 nt, artificial
  Oligomer
cccauggacaaacucaaau

SEQ ID NO: 5118 - RNA, 19 nt, artificial
  Oligomer
guguccaagacaacaugaa

SEQ ID NO: 5119 - RNA, 19 nt, artificial
  Oligomer
ugugagccugcugacuaaa

SEQ ID NO: 5120 - RNA, 19 nt, artificial
  Oligomer
cuuuuggagaaacacaaau

SEQ ID NO: 5121 - RNA, 19 nt, artificial
  Oligomer
ggguucuuggucucacuga

SEQ ID NO: 5122 - RNA, 19 nt, artificial
  Oligomer
gcuguaugaguccuucaag

SEQ ID NO: 5123 - RNA, 19 nt, artificial
  Oligomer
auguacaggcaccagaaaa

SEQ ID NO: 5124 - RNA, 19 nt, artificial
  Oligomer
ccaagagaauuucuagccu

SEQ ID NO: 5125 - RNA, 19 nt, artificial
  Oligomer
guaugaguccuucaaggca

SEQ ID NO: 5126 - RNA, 19 nt, artificial
  Oligomer
agggcucugagauacuuuu

SEQ ID NO: 5127 - RNA, 19 nt, artificial
  Oligomer
cuguggcucacacugugaa

SEQ ID NO: 5128 - RNA, 19 nt, artificial
  Oligomer
ucguguggcuucugcucau

SEQ ID NO: 5129 - RNA, 19 nt, artificial
  Oligomer
accuggugacuacuuguau

SEQ ID NO: 5130 - RNA, 19 nt, artificial
  Oligomer
gugugacaaugagaaagag

SEQ ID NO: 5131 - RNA, 19 nt, artificial
  Oligomer
aggucacucaucuccucau

SEQ ID NO: 5132 - RNA, 19 nt, artificial
  Oligomer
gacuacuuguaucugaaca

SEQ ID NO: 5133 - RNA, 19 nt, artificial
  Oligomer
aaagcagcucugcauguga

SEQ ID NO: 5134 - RNA, 19 nt, artificial
  Oligomer
uugcccuauuugacuccga

SEQ ID NO: 5135 - RNA, 19 nt, artificial
  Oligomer
cacuggaccagaacaucca

SEQ ID NO: 5136 - RNA, 19 nt, artificial
  Oligomer
aauuccucuuccaggugua

SEQ ID NO: 5137 - RNA, 19 nt, artificial
  Oligomer
ucaucuuucaugggcccaa

SEQ ID NO: 5138 - RNA, 19 nt, artificial
  Oligomer
accagaacauccaguucca

SEQ ID NO: 5139 - RNA, 19 nt, artificial
  Oligomer
agugugacaaugagaaaga

SEQ ID NO: 5140 - RNA, 19 nt, artificial
  Oligomer
caguggacaaacaggcugu

SEQ ID NO: 5141 - RNA, 19 nt, artificial
  Oligomer
ccauucugcagaguaucau

SEQ ID NO: 5142 - RNA, 19 nt, artificial
  Oligomer
ugcagaguaucauguacag

SEQ ID NO: 5143 - RNA, 19 nt, artificial
  Oligomer
cugagcagaaagacacuau

SEQ ID NO: 5144 - RNA, 19 nt, artificial
  Oligomer
ucggcuucagauuuuucca

SEQ ID NO: 5145 - RNA, 19 nt, artificial
  Oligomer
ugacaucugcacugggcaa

SEQ ID NO: 5146 - RNA, 19 nt, artificial
  Oligomer
cuuugcagagcgauucuuu

SEQ ID NO: 5147 - RNA, 19 nt, artificial
  Oligomer
cauucugcagaguaucaug

SEQ ID NO: 5148 - RNA, 19 nt, artificial
  Oligomer
ccugagcagaaagacacua

SEQ ID NO: 5149 - RNA, 19 nt, artificial
  Oligomer
agcggucuuucgagugguu

SEQ ID NO: 5150 - RNA, 19 nt, artificial
  Oligomer
gcuuccuggagcugcauau

SEQ ID NO: 5151 - RNA, 19 nt, artificial
  Oligomer
acaucugcacugggcaaga

SEQ ID NO: 5152 - RNA, 19 nt, artificial
  Oligomer
ugacaaugagaaagaguca

SEQ ID NO: 5153 - RNA, 19 nt, artificial
  Oligomer
cacugacuucaagaaugaa

SEQ ID NO: 5154 - RNA, 19 nt, artificial
  Oligomer
agcccuuaguccuucuagu

SEQ ID NO: 5155 - RNA, 19 nt, artificial
  Oligomer
gugacucagcaguuuaaga

SEQ ID NO: 5156 - RNA, 19 nt, artificial
  Oligomer
cugcagaguaucauguaca

SEQ ID NO: 5157 - RNA, 19 nt, artificial
  Oligomer
aagagucaaaggucgucca

SEQ ID NO: 5158 - RNA, 19 nt, artificial
  Oligomer
gggccauugugagaaguuc

SEQ ID NO: 5159 - RNA, 19 nt, artificial
  Oligomer
auacuuuuggagaaacaca

SEQ ID NO: 5160 - RNA, 19 nt, artificial
  Oligomer
uccagaaaguggcugcuga

SEQ ID NO: 5161 - RNA, 19 nt, artificial
  Oligomer
uuaagaccauugcaggaga

SEQ ID NO: 5162 - RNA, 19 nt, artificial
  Oligomer
ugcugcuccuccucauguu

SEQ ID NO: 5163 - RNA, 19 nt, artificial
  Oligomer
agguguaugacaucgaugu

SEQ ID NO: 5164 - RNA, 19 nt, artificial
  Oligomer
aggagaagaaagacuccau

SEQ ID NO: 5165 - RNA, 19 nt, artificial
  Oligomer
cuucaagaaugaagccgca

SEQ ID NO: 5166 - RNA, 19 nt, artificial
  Oligomer
cauccaguuccaccagcuu

SEQ ID NO: 5167 - RNA, 19 nt, artificial
  Oligomer
gagucaaaggucguccaag

SEQ ID NO: 5168 - RNA, 19 nt, artificial
  Oligomer
ucuuccagguguaugacau

SEQ ID NO: 5169 - RNA, 19 nt, artificial
  Oligomer
cagaaaguggcugcugaga

SEQ ID NO: 5170 - RNA, 19 nt, artificial
  Oligomer
guaucauguacaggcacca

SEQ ID NO: 5171 - RNA, 19 nt, artificial
  Oligomer
aguucggcuucagauuuuu

SEQ ID NO: 5172 - RNA, 19 nt, artificial
  Oligomer
ugcugacuaaacuggagau

SEQ ID NO: 5173 - RNA, 19 nt, artificial
  Oligomer
cggucuuucgagugguuug

SEQ ID NO: 5174 - RNA, 19 nt, artificial
  Oligomer
gaaagaguccuucuuugca

SEQ ID NO: 5175 - RNA, 19 nt, artificial
  Oligomer
aagguggacuuuaucugga

SEQ ID NO: 5176 - RNA, 19 nt, artificial
  Oligomer
ucuagccucaccucuccaa

SEQ ID NO: 5177 - RNA, 19 nt, artificial
  Oligomer
cauugugagaaguucggcu

SEQ ID NO: 5178 - RNA, 19 nt, artificial
  Oligomer
acuggagcaagguguucca

SEQ ID NO: 5179 - RNA, 19 nt, artificial
  Oligomer
uccuaccacuggaccagaa

SEQ ID NO: 5180 - RNA, 19 nt, artificial
  Oligomer
gugcaucauggaagucaac

SEQ ID NO: 5181 - RNA, 19 nt, artificial
  Oligomer
gcuccauaagguggacuuu

SEQ ID NO: 5182 - RNA, 19 nt, artificial
  Oligomer
guucuaagaggcugucgag

SEQ ID NO: 5183 - RNA, 19 nt, artificial
  Oligomer
caucuuucaugggcccaac

SEQ ID NO: 5184 - RNA, 19 nt, artificial
  Oligomer
cugcugacuaaacuggaga

SEQ ID NO: 5185 - RNA, 19 nt, artificial
  Oligomer
ucagcaguuuaagaccauu

SEQ ID NO: 5186 - RNA, 19 nt, artificial
  Oligomer
cugcacugggcaagaauga

SEQ ID NO: 5187 - RNA, 19 nt, artificial
  Oligomer
uacggacgacgccuaugaa

SEQ ID NO: 5188 - RNA, 19 nt, artificial
  Oligomer
ugacaucgaugugugugca

SEQ ID NO: 5189 - RNA, 19 nt, artificial
  Oligomer
cugcauauguacaugacau

SEQ ID NO: 5190 - RNA, 19 nt, artificial
  Oligomer
ccgaggucucaauccauug

SEQ ID NO: 5191 - RNA, 19 nt, artificial
  Oligomer
uccauaagguggacuuuau

SEQ ID NO: 5192 - RNA, 19 nt, artificial
  Oligomer
cacucaucuccucaucaag

SEQ ID NO: 5193 - RNA, 19 nt, artificial
  Oligomer
ugaagggccauugugagaa

SEQ ID NO: 5194 - RNA, 19 nt, artificial
  Oligomer
aagagaauuucuagccuca

SEQ ID NO: 5195 - RNA, 19 nt, artificial
  Oligomer
aagaguccuucuuugcaga

SEQ ID NO: 5196 - RNA, 19 nt, artificial
  Oligomer
guuuaagaccauugcagga

SEQ ID NO: 5197 - RNA, 19 nt, artificial
  Oligomer
ucauguuguaucuggaauu

SEQ ID NO: 5198 - RNA, 19 nt, artificial
  Oligomer
ugaacuuuguacuccaggc

SEQ ID NO: 5199 - RNA, 19 nt, artificial
  Oligomer
ggacuuuaucuggaucaac

SEQ ID NO: 5200 - RNA, 19 nt, artificial
  Oligomer
cuaugaagcccuuaguccu

SEQ ID NO: 5201 - RNA, 19 nt, artificial
  Oligomer
cgauagaaguggcaccauc

SEQ ID NO: 5202 - RNA, 19 nt, artificial
  Oligomer
gagaaagagucaaaggucg

SEQ ID NO: 5203 - RNA, 19 nt, artificial
  Oligomer
ccacuuugagguguucuau

SEQ ID NO: 5204 - RNA, 19 nt, artificial
  Oligomer
uguggcuucugcucaucuu

SEQ ID NO: 5205 - RNA, 19 nt, artificial
  Oligomer
ugguaugcagucauguugu

SEQ ID NO: 5206 - RNA, 19 nt, artificial
  Oligomer
ccuggaaucuuguuuuucc

SEQ ID NO: 5207 - RNA, 19 nt, artificial
  Oligomer
cuggugccuggaaucuugu

SEQ ID NO: 5208 - RNA, 19 nt, artificial
  Oligomer
ccaacuucuggaaguggcu

SEQ ID NO: 5209 - RNA, 19 nt, artificial
  Oligomer
agucaaaggucguccaagg

SEQ ID NO: 5210 - RNA, 19 nt, artificial
  Oligomer
uccuggccaacaaggagaa

SEQ ID NO: 5211 - RNA, 19 nt, artificial
  Oligomer
ugagguguucuauuggacu

SEQ ID NO: 5212 - RNA, 19 nt, artificial
  Oligomer
ugagccugcugacuaaacu

SEQ ID NO: 5213 - RNA, 19 nt, artificial
  Oligomer
cucaaguccuaccacugga

SEQ ID NO: 5214 - RNA, 19 nt, artificial
  Oligomer
gucauguuguaucuggaau

SEQ ID NO: 5215 - RNA, 19 nt, artificial
  Oligomer
uggagaaacacaaauucug

SEQ ID NO: 5216 - RNA, 19 nt, artificial
  Oligomer
ggcucacacugugaacuuu

SEQ ID NO: 5217 - RNA, 19 nt, artificial
  Oligomer
caguuuaagaccauugcag

SEQ ID NO: 5218 - RNA, 19 nt, artificial
  Oligomer
cuaucuggcugcacauucg

SEQ ID NO: 5219 - RNA, 19 nt, artificial
  Oligomer
caaacaggcuguaugaguc

SEQ ID NO: 5220 - RNA, 19 nt, artificial
  Oligomer
ccuuuuuuucacuauagac

SEQ ID NO: 5221 - RNA, 19 nt, artificial
  Oligomer
uggagaaccugaccaucag

SEQ ID NO: 5222 - RNA, 19 nt, artificial
  Oligomer
agaaguucggcuucagauu

SEQ ID NO: 5223 - RNA, 19 nt, artificial
  Oligomer
auccgaggucucaauccau

SEQ ID NO: 5224 - RNA, 19 nt, artificial
  Oligomer
ugugaacuuuguacuccag

SEQ ID NO: 5225 - RNA, 19 nt, artificial
  Oligomer
uggagcaagguguuccaga

SEQ ID NO: 5226 - RNA, 19 nt, artificial
  Oligomer
ucaagaaugaagccgcaga

SEQ ID NO: 5227 - RNA, 19 nt, artificial
  Oligomer
agaaagagucaaaggucgu

SEQ ID NO: 5228 - RNA, 19 nt, artificial
  Oligomer
ccuuugcuuccauucugca

SEQ ID NO: 5229 - RNA, 19 nt, artificial
  Oligomer
gagucauggagaaccugac

SEQ ID NO: 5230 - RNA, 19 nt, artificial
  Oligomer
agaacauccaguuccacca

SEQ ID NO: 5231 - RNA, 19 nt, artificial
  Oligomer
aucgaugggccuuauggga

SEQ ID NO: 5232 - RNA, 19 nt, artificial
  Oligomer
cagaaaagaaagcauacuu

SEQ ID NO: 5233 - RNA, 19 nt, artificial
  Oligomer
cagugccucaacuucgacu

SEQ ID NO: 5234 - RNA, 19 nt, artificial
  Oligomer
ucuaguugcgcuuuugcua

SEQ ID NO: 5235 - RNA, 19 nt, artificial
  Oligomer
gguguaugacaucgaugug

SEQ ID NO: 5236 - RNA, 19 nt, artificial
  Oligomer
uugaccuccuggccaacaa

SEQ ID NO: 5237 - RNA, 19 nt, artificial
  Oligomer
cucuuccagguguaugaca

SEQ ID NO: 5238 - RNA, 19 nt, artificial
  Oligomer
cacuuugagguguucuauu

SEQ ID NO: 5239 - RNA, 19 nt, artificial
  Oligomer
ccugcaagaauucaaagca

SEQ ID NO: 5240 - RNA, 19 nt, artificial
  Oligomer
agguguucuauuggacuca

SEQ ID NO: 5241 - RNA, 19 nt, artificial
  Oligomer
gugagaaguucggcuucag

SEQ ID NO: 5242 - RNA, 19 nt, artificial
  Oligomer
agugguuugugagccugcu

SEQ ID NO: 5243 - RNA, 19 nt, artificial
  Oligomer
uggacaaacucaaauuccu

SEQ ID NO: 5244 - RNA, 19 nt, artificial
  Oligomer
uccagguguaugacaucga

SEQ ID NO: 5245 - RNA, 19 nt, artificial
  Oligomer
ucuaagaggcugucgagga

SEQ ID NO: 5246 - RNA, 19 nt, artificial
  Oligomer
uaugaguccuucaaggcau

SEQ ID NO: 5247 - RNA, 19 nt, artificial
  Oligomer
cugucgaggagugugacaa

SEQ ID NO: 5248 - RNA, 19 nt, artificial
  Oligomer
uuugagguguucuauugga

SEQ ID NO: 5249 - RNA, 19 nt, artificial
  Oligomer
auuggacucaccuguccua

SEQ ID NO: 5250 - RNA, 19 nt, artificial
  Oligomer
ggucucacugacuucaaga

SEQ ID NO: 5251 - RNA, 19 nt, artificial
  Oligomer
ggccauugugagaaguucg

SEQ ID NO: 5252 - RNA, 19 nt, artificial
  Oligomer
agacaacaugaagcuccau

SEQ ID NO: 5253 - RNA, 19 nt, artificial
  Oligomer
gagugugacaaugagaaag

SEQ ID NO: 5254 - RNA, 19 nt, artificial
  Oligomer
aucugcacugggcaagaau

SEQ ID NO: 5255 - RNA, 19 nt, artificial
  Oligomer
gguggacuuuaucuggauc

SEQ ID NO: 5256 - RNA, 19 nt, artificial
  Oligomer
ggaauugguggguucuugg

SEQ ID NO: 5257 - RNA, 19 nt, artificial
  Oligomer
cuuuaucuggaucaacaga

SEQ ID NO: 5258 - RNA, 19 nt, artificial
  Oligomer
uucugcagaguaucaugua

SEQ ID NO: 5259 - RNA, 19 nt, artificial
  Oligomer
agaaugacaugaaggccau

SEQ ID NO: 5260 - RNA, 19 nt, artificial
  Oligomer
uggucucacugacuucaag

SEQ ID NO: 5261 - RNA, 19 nt, artificial
  Oligomer
acuguggcucacacuguga

SEQ ID NO: 5262 - RNA, 19 nt, artificial
  Oligomer
guaugcagucauguuguau

SEQ ID NO: 5263 - RNA, 19 nt, artificial
  Oligomer
guccuucuuugcagagcga

SEQ ID NO: 5264 - RNA, 19 nt, artificial
  Oligomer
ugcugagaagaagggcaag

SEQ ID NO: 5265 - RNA, 19 nt, artificial
  Oligomer
uccucuuccagguguauga

SEQ ID NO: 5266 - RNA, 19 nt, artificial
  Oligomer
ucugagauacuuuuggaga

SEQ ID NO: 5267 - RNA, 19 nt, artificial
  Oligomer
agagcgauucuuugcccua

SEQ ID NO: 5268 - RNA, 19 nt, artificial
  Oligomer
caagaaugaagccgcagac

SEQ ID NO: 5269 - RNA, 19 nt, artificial
  Oligomer
aagacacuaucuggcugca

SEQ ID NO: 5270 - RNA, 19 nt, artificial
  Oligomer
ccauaagguggacuuuauc

SEQ ID NO: 5271 - RNA, 19 nt, artificial
  Oligomer
caugaagcuccauaaggug

SEQ ID NO: 5272 - RNA, 19 nt, artificial
  Oligomer
uggugccuggaaucuuguu

SEQ ID NO: 5273 - RNA, 19 nt, artificial
  Oligomer
cugagaagaagggcaaggu

SEQ ID NO: 5274 - RNA, 19 nt, artificial
  Oligomer
aagggcucugagauacuuu

SEQ ID NO: 5275 - RNA, 19 nt, artificial
  Oligomer
gcaucauggaagucaaccu

SEQ ID NO: 5276 - RNA, 19 nt, artificial
  Oligomer
gacuaaacuggagauggac

SEQ ID NO: 5277 - RNA, 19 nt, artificial
  Oligomer
ggugcaggucuucuucugu

SEQ ID NO: 5278 - RNA, 19 nt, artificial
  Oligomer
ucauggagaaccugaccau

SEQ ID NO: 5279 - RNA, 19 nt, artificial
  Oligomer
cauaagguggacuuuaucu

SEQ ID NO: 5280 - RNA, 19 nt, artificial
  Oligomer
aggcuguaugaguccuuca

SEQ ID NO: 5281 - RNA, 19 nt, artificial
  Oligomer
cuuucgagugguuugugag

SEQ ID NO: 5282 - RNA, 19 nt, artificial
  Oligomer
uccaguuccaccagcuuau

SEQ ID NO: 5283 - RNA, 19 nt, artificial
  Oligomer
aauucaaagcagcucugca

SEQ ID NO: 5284 - RNA, 19 nt, artificial
  Oligomer
cugggcaagaaugacauga

SEQ ID NO: 5285 - RNA, 19 nt, artificial
  Oligomer
agguguccaagacaacaug

SEQ ID NO: 5286 - RNA, 19 nt, artificial
  Oligomer
gguucuuggucucacugac

SEQ ID NO: 5287 - RNA, 19 nt, artificial
  Oligomer
gcgcuuuugcuauggccuu

SEQ ID NO: 5288 - RNA, 19 nt, artificial
  Oligomer
acuauagaccuggugacua

SEQ ID NO: 5289 - RNA, 19 nt, artificial
  Oligomer
cacuauagaccuggugacu

SEQ ID NO: 5290 - RNA, 19 nt, artificial
  Oligomer
guggccacuuugagguguu

SEQ ID NO: 5291 - RNA, 19 nt, artificial
  Oligomer
ccgauagaaguggcaccau

SEQ ID NO: 5292 - RNA, 19 nt, artificial
  Oligomer
ugagaagaagggcaaggug

SEQ ID NO: 5293 - RNA, 19 nt, artificial
  Oligomer
ggcugguaugcagucaugu

SEQ ID NO: 5294 - RNA, 19 nt, artificial
  Oligomer
agcgauucuuugcccuauu

SEQ ID NO: 5295 - RNA, 19 nt, artificial
  Oligomer
caggaucuuugccucugag

SEQ ID NO: 5296 - RNA, 19 nt, artificial
  Oligomer
guggacaaacaggcuguau

SEQ ID NO: 5297 - RNA, 19 nt, artificial
  Oligomer
ggagaagaaagacuccauc

SEQ ID NO: 5298 - RNA, 19 nt, artificial
  Oligomer
aaguucggcuucagauuuu

SEQ ID NO: 5299 - RNA, 19 nt, artificial
  Oligomer
gauacuuuuggagaaacac

SEQ ID NO: 5300 - RNA, 19 nt, artificial
  Oligomer
caagguguuccagaaagug

SEQ ID NO: 5301 - RNA, 19 nt, artificial
  Oligomer
cagguguaugacaucgaug

SEQ ID NO: 5302 - RNA, 19 nt, artificial
  Oligomer
gcaagaaugacaugaaggc

SEQ ID NO: 5303 - RNA, 19 nt, artificial
  Oligomer
cucacacugugaacuuugu

SEQ ID NO: 5304 - RNA, 19 nt, artificial
  Oligomer
cuccauaagguggacuuua

SEQ ID NO: 5305 - RNA, 19 nt, artificial
  Oligomer
cuuucaugggcccaacuuc

SEQ ID NO: 5306 - RNA, 19 nt, artificial
  Oligomer
cacuaucuggcugcacauu

SEQ ID NO: 5307 - RNA, 19 nt, artificial
  Oligomer
gacuccgauagaaguggca

SEQ ID NO: 5308 - RNA, 19 nt, artificial
  Oligomer
ggucuuucgagugguuugu

SEQ ID NO: 5309 - RNA, 19 nt, artificial
  Oligomer
ccuggugacuacuuguauc

SEQ ID NO: 5310 - RNA, 19 nt, artificial
  Oligomer
auucaaagcagcucugcau

SEQ ID NO: 5311 - RNA, 19 nt, artificial
  Oligomer
cuaguugcgcuuuugcuau

SEQ ID NO: 5312 - RNA, 19 nt, artificial
  Oligomer
aguggcugcugagaagaag

SEQ ID NO: 5313 - RNA, 19 nt, artificial
  Oligomer
uccauucugcagaguauca

SEQ ID NO: 5314 - RNA, 19 nt, artificial
  Oligomer
ugguuugugagccugcuga

SEQ ID NO: 5315 - RNA, 19 nt, artificial
  Oligomer
ugugacaaugagaaagagu

SEQ ID NO: 5316 - RNA, 19 nt, artificial
  Oligomer
gaaagacacuaucuggcug

SEQ ID NO: 5317 - RNA, 19 nt, artificial
  Oligomer
agcaagguguuccagaaag

SEQ ID NO: 5318 - RNA, 19 nt, artificial
  Oligomer
agugcuccugagcagaaag

SEQ ID NO: 5319 - RNA, 19 nt, artificial
  Oligomer
gccuggaaucuuguuuuuc

SEQ ID NO: 5320 - RNA, 19 nt, artificial
  Oligomer
cugcuccuccucauguuca

SEQ ID NO: 5321 - RNA, 19 nt, artificial
  Oligomer
acaaacaggcuguaugagu

SEQ ID NO: 5322 - RNA, 19 nt, artificial
  Oligomer
gucucacugacuucaagaa

SEQ ID NO: 5323 - RNA, 19 nt, artificial
  Oligomer
acaugaaggccauuggccu

SEQ ID NO: 5324 - RNA, 19 nt, artificial
  Oligomer
guggacuuuaucuggauca

SEQ ID NO: 5325 - RNA, 19 nt, artificial
  Oligomer
cgccuaugaagcccuuagu

SEQ ID NO: 5326 - RNA, 19 nt, artificial
  Oligomer
cuggccaacaaggagaaga

SEQ ID NO: 5327 - RNA, 19 nt, artificial
  Oligomer
ucuuucgagugguuuguga

SEQ ID NO: 5328 - RNA, 19 nt, artificial
  Oligomer
cucugagauacuuuuggag

SEQ ID NO: 5329 - RNA, 19 nt, artificial
  Oligomer
cuucaaggcaucagaccca

SEQ ID NO: 5330 - RNA, 19 nt, artificial
  Oligomer
acuccuggaucgaaggugu

SEQ ID NO: 5331 - RNA, 19 nt, artificial
  Oligomer
guggcuucugcucaucuuu

SEQ ID NO: 5332 - RNA, 19 nt, artificial
  Oligomer
gcauauguacaugacaucu

SEQ ID NO: 5333 - RNA, 19 nt, artificial
  Oligomer
uauuugacuccgauagaag

SEQ ID NO: 5334 - RNA, 19 nt, artificial
  Oligomer
agaaaagaaagcauacuug

SEQ ID NO: 5335 - RNA, 19 nt, artificial
  Oligomer
agggccauugugagaaguu

SEQ ID NO: 5336 - RNA, 19 nt, artificial
  Oligomer
cugcaagaauucaaagcag

SEQ ID NO: 5337 - RNA, 19 nt, artificial
  Oligomer
ucauggaagucaaccuccu

SEQ ID NO: 5338 - RNA, 19 nt, artificial
  Oligomer
ugccucaacuucgacugca

SEQ ID NO: 5339 - RNA, 19 nt, artificial
  Oligomer
guuguaucuggaauuggug

SEQ ID NO: 5340 - RNA, 19 nt, artificial
  Oligomer
ccagaaaagaaagcauacu

SEQ ID NO: 5341 - RNA, 19 nt, artificial
  Oligomer
ggcaagaaugacaugaagg

SEQ ID NO: 5342 - RNA, 19 nt, artificial
  Oligomer
aagguguccaagacaacau

SEQ ID NO: 5343 - RNA, 19 nt, artificial
  Oligomer
ggcucugagauacuuuugg

SEQ ID NO: 5344 - RNA, 19 nt, artificial
  Oligomer
gggcucugagauacuuuug

SEQ ID NO: 5345 - RNA, 19 nt, artificial
  Oligomer
gguguuccagaaaguggcu

SEQ ID NO: 5346 - RNA, 19 nt, artificial
  Oligomer
cuggagcugcauauguaca

SEQ ID NO: 5347 - RNA, 19 nt, artificial
  Oligomer
agaaagacacuaucuggcu

SEQ ID NO: 5348 - RNA, 19 nt, artificial
  Oligomer
gacgccuaugaagcccuua

SEQ ID NO: 5349 - RNA, 19 nt, artificial
  Oligomer
uguccaagacaacaugaag

SEQ ID NO: 5350 - RNA, 19 nt, artificial
  Oligomer
cuaaacuggagauggacca

SEQ ID NO: 5351 - RNA, 19 nt, artificial
  Oligomer
agaauuucuagccucaccu

SEQ ID NO: 5352 - RNA, 19 nt, artificial
  Oligomer
aacuucgacugcagcuuca

SEQ ID NO: 5353 - RNA, 19 nt, artificial
  Oligomer
agccugcaagaauucaaag

SEQ ID NO: 5354 - RNA, 19 nt, artificial
  Oligomer
aucauguacaggcaccaga

SEQ ID NO: 5355 - RNA, 19 nt, artificial
  Oligomer
cauggaagucaaccuccuc

SEQ ID NO: 5356 - RNA, 19 nt, artificial
  Oligomer
acugacccugcucauccau

SEQ ID NO: 5357 - RNA, 19 nt, artificial
  Oligomer
gugugcaucauggaaguca

SEQ ID NO: 5358 - RNA, 19 nt, artificial
  Oligomer
gcagaaagacacuaucugg

SEQ ID NO: 5359 - RNA, 19 nt, artificial
  Oligomer
gaaugacaugaaggccauu

SEQ ID NO: 5360 - RNA, 19 nt, artificial
  Oligomer
ggaaucuuguuuuuccugg

SEQ ID NO: 5361 - RNA, 19 nt, artificial
  Oligomer
ugaagcuccauaaggugga

SEQ ID NO: 5362 - RNA, 19 nt, artificial
  Oligomer
cuuccagguguaugacauc

SEQ ID NO: 5363 - RNA, 19 nt, artificial
  Oligomer
uggacaaacaggcuguaug

SEQ ID NO: 5364 - RNA, 19 nt, artificial
  Oligomer
uccugagcagaaagacacu

SEQ ID NO: 5365 - RNA, 19 nt, artificial
  Oligomer
ccagaacauccaguuccac

SEQ ID NO: 5366 - RNA, 19 nt, artificial
  Oligomer
aaggccaguggacaaacag

SEQ ID NO: 5367 - RNA, 19 nt, artificial
  Oligomer
ggcuucagauuuuuccaag

SEQ ID NO: 5368 - RNA, 19 nt, artificial
  Oligomer
gucacucaucuccucauca

SEQ ID NO: 5369 - RNA, 19 nt, artificial
  Oligomer
auccaguuccaccagcuua

SEQ ID NO: 5370 - RNA, 19 nt, artificial
  Oligomer
ucacacugugaacuuugua

SEQ ID NO: 5371 - RNA, 19 nt, artificial
  Oligomer
acauccaguuccaccagcu

SEQ ID NO: 5372 - RNA, 19 nt, artificial
  Oligomer
ccuucuaguugcgcuuuug

SEQ ID NO: 5373 - RNA, 19 nt, artificial
  Oligomer
ggacaaacucaaauuccuc

SEQ ID NO: 5374 - RNA, 19 nt, artificial
  Oligomer
ggugacucagcaguuuaag

SEQ ID NO: 5375 - RNA, 19 nt, artificial
  Oligomer
uaccacuggaccagaacau

SEQ ID NO: 5376 - RNA, 19 nt, artificial
  Oligomer
gagauacuuuuggagaaac

SEQ ID NO: 5377 - RNA, 19 nt, artificial
  Oligomer
uuucaugggcccaacuucu

SEQ ID NO: 5378 - RNA, 19 nt, artificial
  Oligomer
caacaaggagaagaaagac

SEQ ID NO: 5379 - RNA, 19 nt, artificial
  Oligomer
ucugcagaguaucauguac

SEQ ID NO: 5380 - RNA, 19 nt, artificial
  Oligomer
uggagcugcauauguacau

SEQ ID NO: 5381 - RNA, 19 nt, artificial
  Oligomer
gugcuccugagcagaaaga

SEQ ID NO: 5382 - RNA, 19 nt, artificial
  Oligomer
uuggucucacugacuucaa

SEQ ID NO: 5383 - RNA, 19 nt, artificial
  Oligomer
caaggucacucaucuccuc

SEQ ID NO: 5384 - RNA, 19 nt, artificial
  Oligomer
aguccuucuaguugcgcuu

SEQ ID NO: 5385 - RNA, 19 nt, artificial
  Oligomer
augcagucauguuguaucu

SEQ ID NO: 5386 - RNA, 19 nt, artificial
  Oligomer
uuuucacuauagaccuggu

SEQ ID NO: 5387 - RNA, 19 nt, artificial
  Oligomer
gcagucauguuguaucugg

SEQ ID NO: 5388 - RNA, 19 nt, artificial
  Oligomer
cacugugaacuuuguacuc

SEQ ID NO: 5389 - RNA, 19 nt, artificial
  Oligomer
guaacaucaagugcuacau

SEQ ID NO: 5390 - RNA, 19 nt, artificial
  Oligomer
gcggucuuucgagugguuu

SEQ ID NO: 5391 - RNA, 19 nt, artificial
  Oligomer
uuggagaaacacaaauucu

SEQ ID NO: 5392 - RNA, 19 nt, artificial
  Oligomer
agcugcauauguacaugac

SEQ ID NO: 5393 - RNA, 19 nt, artificial
  Oligomer
auuugacuccgauagaagu

SEQ ID NO: 5394 - RNA, 19 nt, artificial
  Oligomer
ucaaggcaucagacccacu

SEQ ID NO: 5395 - RNA, 19 nt, artificial
  Oligomer
aagaaagacuccaucacgg

SEQ ID NO: 5396 - RNA, 19 nt, artificial
  Oligomer
cuguaugaguccuucaagg

SEQ ID NO: 5397 - RNA, 19 nt, artificial
  Oligomer
gugaaagaguccuucuuug

SEQ ID NO: 5398 - RNA, 19 nt, artificial
  Oligomer
augagaaagagucaaaggu

SEQ ID NO: 5399 - RNA, 19 nt, artificial
  Oligomer
accagaaaagaaagcauac

SEQ ID NO: 5400 - RNA, 19 nt, artificial
  Oligomer
aggucucaauccauugcgc

SEQ ID NO: 5401 - RNA, 19 nt, artificial
  Oligomer
acugggcaagaaugacaug

SEQ ID NO: 5402 - RNA, 19 nt, artificial
  Oligomer
gccauugugagaaguucgg

SEQ ID NO: 5403 - RNA, 19 nt, artificial
  Oligomer
uuuuccuggagaaggccau

SEQ ID NO: 5404 - RNA, 19 nt, artificial
  Oligomer
cuuuugcuauggccuucgu

SEQ ID NO: 5405 - RNA, 19 nt, artificial
  Oligomer
ugcaugugaaagaguccuu

SEQ ID NO: 5406 - RNA, 19 nt, artificial
  Oligomer
cuucgacugcagcuucauc

SEQ ID NO: 5407 - RNA, 19 nt, artificial
  Oligomer
gaauuucuagccucaccuc

SEQ ID NO: 5408 - RNA, 19 nt, artificial
  Oligomer
uguacaggcaccagaaaag

SEQ ID NO: 5409 - RNA, 19 nt, artificial
  Oligomer
uccgauagaaguggcacca

SEQ ID NO: 5410 - RNA, 19 nt, artificial
  Oligomer
gaaguucggcuucagauuu

SEQ ID NO: 5411 - RNA, 19 nt, artificial
  Oligomer
gcucugcaugugaaagagu

SEQ ID NO: 5412 - RNA, 19 nt, artificial
  Oligomer
ucuggaucaacagagacca

SEQ ID NO: 5413 - RNA, 19 nt, artificial
  Oligomer
cauggacaaacucaaauuc

SEQ ID NO: 5414 - RNA, 19 nt, artificial
  Oligomer
ugugaaagaguccuucuuu

SEQ ID NO: 5415 - RNA, 19 nt, artificial
  Oligomer
uccaccagcuuaugggcua

SEQ ID NO: 5416 - RNA, 19 nt, artificial
  Oligomer
guguggcuucugcucaucu

SEQ ID NO: 5417 - RNA, 19 nt, artificial
  Oligomer
cuggaauugguggguucuu

SEQ ID NO: 5418 - RNA, 19 nt, artificial
  Oligomer
ugagaaagagucaaagguc

SEQ ID NO: 5419 - RNA, 19 nt, artificial
  Oligomer
acuacuuguaucugaacau

SEQ ID NO: 5420 - RNA, 19 nt, artificial
  Oligomer
acacugugaacuuuguacu

SEQ ID NO: 5421 - RNA, 19 nt, artificial
  Oligomer
acaugacaucugcacuggg

SEQ ID NO: 5422 - RNA, 19 nt, artificial
  Oligomer
aaaguggcugcugagaaga

SEQ ID NO: 5423 - RNA, 19 nt, artificial
  Oligomer
cucaacuucgacugcagcu

SEQ ID NO: 5424 - RNA, 19 nt, artificial
  Oligomer
cauguucaucugcuccagu

SEQ ID NO: 5425 - RNA, 19 nt, artificial
  Oligomer
gacaaacaggcuguaugag

SEQ ID NO: 5426 - RNA, 19 nt, artificial
  Oligomer
caugugaaagaguccuucu

SEQ ID NO: 5427 - RNA, 19 nt, artificial
  Oligomer
cugguaugcagucauguug

SEQ ID NO: 5428 - RNA, 19 nt, artificial
  Oligomer
cuuugagguguucuauugg

SEQ ID NO: 5429 - RNA, 19 nt, artificial
  Oligomer
aaguccuaccacuggacca

SEQ ID NO: 5430 - RNA, 19 nt, artificial
  Oligomer
augacaucugcacugggca

SEQ ID NO: 5431 - RNA, 19 nt, artificial
  Oligomer
cagagcgauucuuugcccu

SEQ ID NO: 5432 - RNA, 19 nt, artificial
  Oligomer
uggcucaaguccuaccacu

SEQ ID NO: 5433 - RNA, 19 nt, artificial
  Oligomer
agcuccauaagguggacuu

SEQ ID NO: 5434 - RNA, 19 nt, artificial
  Oligomer
acuuuaucuggaucaacag

SEQ ID NO: 5435 - RNA, 19 nt, artificial
  Oligomer
guguaugacaucgaugugu

SEQ ID NO: 5436 - RNA, 19 nt, artificial
  Oligomer
aagggccauugugagaagu

SEQ ID NO: 5437 - RNA, 19 nt, artificial
  Oligomer
cagcaguuuaagaccauug

SEQ ID NO: 5438 - RNA, 19 nt, artificial
  Oligomer
uuugcagagcgauucuuug

SEQ ID NO: 5439 - RNA, 19 nt, artificial
  Oligomer
auuggcuggguacacgguu

SEQ ID NO: 5440 - RNA, 19 nt, artificial
  Oligomer
caaggagaagaaagacucc

SEQ ID NO: 5441 - RNA, 19 nt, artificial
  Oligomer
cauugcucgcuaugagugg

SEQ ID NO: 5442 - RNA, 19 nt, artificial
  Oligomer
aagaauucaaagcagcucu

SEQ ID NO: 5443 - RNA, 19 nt, artificial
  Oligomer
cagaguaucauguacaggc

SEQ ID NO: 5444 - RNA, 19 nt, artificial
  Oligomer
augggcccaacuucuggaa

SEQ ID NO: 5445 - RNA, 19 nt, artificial
  Oligomer
cgaggucucaauccauugc

SEQ ID NO: 5446 - RNA, 19 nt, artificial
  Oligomer
acuucgacugcagcuucau

SEQ ID NO: 5447 - RNA, 19 nt, artificial
  Oligomer
accauugcucgcuaugagu

SEQ ID NO: 5448 - RNA, 19 nt, artificial
  Oligomer
agcuuaugggcuacguggu

SEQ ID NO: 5449 - RNA, 19 nt, artificial
  Oligomer
acuggaccagaacauccag

SEQ ID NO: 5450 - RNA, 19 nt, artificial
  Oligomer
gagccugcugacuaaacug

SEQ ID NO: 5451 - RNA, 19 nt, artificial
  Oligomer
cuggaucaacagagaccag

SEQ ID NO: 5452 - RNA, 19 nt, artificial
  Oligomer
aucgaagguguccaagaca

SEQ ID NO: 5453 - RNA, 19 nt, artificial
  Oligomer
auauguacaugacaucugc

SEQ ID NO: 5454 - RNA, 19 nt, artificial
  Oligomer
uggcucacacugugaacuu

SEQ ID NO: 5455 - RNA, 19 nt, artificial
  Oligomer
ccuuaguccuucuaguugc

SEQ ID NO: 5456 - RNA, 19 nt, artificial
  Oligomer
gaagaaagacuccaucacg

SEQ ID NO: 5457 - RNA, 19 nt, artificial
  Oligomer
cgauucuuugcccuauuug

SEQ ID NO: 5458 - RNA, 19 nt, artificial
  Oligomer
uguaugacaucgaugugug

SEQ ID NO: 5459 - RNA, 19 nt, artificial
  Oligomer
aacagagaccagcggucuu

SEQ ID NO: 5460 - RNA, 19 nt, artificial
  Oligomer
agugccucaacuucgacug

SEQ ID NO: 5461 - RNA, 19 nt, artificial
  Oligomer
gucgaggagugugacaaug

SEQ ID NO: 5462 - RNA, 19 nt, artificial
  Oligomer
uguaacaucaagugcuaca

SEQ ID NO: 5463 - RNA, 19 nt, artificial
  Oligomer
uuugcuuccauucugcaga

SEQ ID NO: 5464 - RNA, 19 nt, artificial
  Oligomer
uguucuauuggacucaccu

SEQ ID NO: 5465 - RNA, 19 nt, artificial
  Oligomer
cucauguucaucugcucca

SEQ ID NO: 5466 - RNA, 19 nt, artificial
  Oligomer
uauguacaugacaucugca

SEQ ID NO: 5467 - RNA, 19 nt, artificial
  Oligomer
ucauguucaucugcuccag

SEQ ID NO: 5468 - RNA, 19 nt, artificial
  Oligomer
uucuagccucaccucucca

SEQ ID NO: 5469 - RNA, 19 nt, artificial
  Oligomer
cauugcaggagaagauggg

SEQ ID NO: 5470 - RNA, 19 nt, artificial
  Oligomer
gagguguucuauuggacuc

SEQ ID NO: 5471 - RNA, 19 nt, artificial
  Oligomer
ucgagugguuugugagccu

SEQ ID NO: 5472 - RNA, 19 nt, artificial
  Oligomer
cuuggucucacugacuuca

SEQ ID NO: 5473 - RNA, 19 nt, artificial
  Oligomer
acucagcaguuuaagacca

SEQ ID NO: 5474 - RNA, 19 nt, artificial
  Oligomer
cuuguuuuuccuggagaag

SEQ ID NO: 5475 - RNA, 19 nt, artificial
  Oligomer
ugagcagaaagacacuauc

SEQ ID NO: 5476 - RNA, 19 nt, artificial
  Oligomer
ucuuucaugggcccaacuu

SEQ ID NO: 5477 - RNA, 19 nt, artificial
  Oligomer
cuccaaggucacucaucuc

SEQ ID NO: 5478 - RNA, 19 nt, artificial
  Oligomer
gugagccugcugacuaaac

SEQ ID NO: 5479 - RNA, 19 nt, artificial
  Oligomer
ggaccagaacauccaguuc

SEQ ID NO: 5480 - RNA, 19 nt, artificial
  Oligomer
auguucaucugcuccaguu

SEQ ID NO: 5481 - RNA, 19 nt, artificial
  Oligomer
acaaacucaaauuccucuu

SEQ ID NO: 5482 - RNA, 19 nt, artificial
  Oligomer
gugcaggucuucuucugug

SEQ ID NO: 5483 - RNA, 19 nt, artificial
  Oligomer
uucagauuuuuccaagaga

SEQ ID NO: 5484 - RNA, 19 nt, artificial
  Oligomer
auggagaaccugaccauca

SEQ ID NO: 5485 - RNA, 19 nt, artificial
  Oligomer
aucuuguuuuuccuggaga

SEQ ID NO: 5486 - RNA, 19 nt, artificial
  Oligomer
uaagguggacuuuaucugg

SEQ ID NO: 5487 - RNA, 19 nt, artificial
  Oligomer
gaagcccuuaguccuucua

SEQ ID NO: 5488 - RNA, 19 nt, artificial
  Oligomer
cugcaugugaaagaguccu

SEQ ID NO: 5489 - RNA, 19 nt, artificial
  Oligomer
cuuccuggagcugcauaug

SEQ ID NO: 5490 - RNA, 19 nt, artificial
  Oligomer
acaucgaugggccuuaugg

SEQ ID NO: 5491 - RNA, 19 nt, artificial
  Oligomer
gacucagcaguuuaagacc

SEQ ID NO: 5492 - RNA, 19 nt, artificial
  Oligomer
acagagaccagcggucuuu

SEQ ID NO: 5493 - RNA, 19 nt, artificial
  Oligomer
agcucugcaugugaaagag

SEQ ID NO: 5494 - RNA, 19 nt, artificial
  Oligomer
aaggugcaggucuucuucu

SEQ ID NO: 5495 - RNA, 19 nt, artificial
  Oligomer
uguacaugacaucugcacu

SEQ ID NO: 5496 - RNA, 19 nt, artificial
  Oligomer
gaagcuccauaagguggac

SEQ ID NO: 5497 - RNA, 19 nt, artificial
  Oligomer
gcagaguaucauguacagg

SEQ ID NO: 5498 - RNA, 19 nt, artificial
  Oligomer
guaucuggaauuggugggu

SEQ ID NO: 5499 - RNA, 19 nt, artificial
  Oligomer
gguguucuauuggacucac

SEQ ID NO: 5500 - RNA, 19 nt, artificial
  Oligomer
aguuuaagaccauugcagg

SEQ ID NO: 5501 - RNA, 19 nt, artificial
  Oligomer
gaaaagaaagcauacuugc

SEQ ID NO: 5502 - RNA, 19 nt, artificial
  Oligomer
gaaagagucaaaggucguc

SEQ ID NO: 5503 - RNA, 19 nt, artificial
  Oligomer
caggcuguaugaguccuuc

SEQ ID NO: 5504 - RNA, 19 nt, artificial
  Oligomer
uugagguguucuauuggac

SEQ ID NO: 5505 - RNA, 19 nt, artificial
  Oligomer
aucuuucaugggcccaacu

SEQ ID NO: 5506 - RNA, 19 nt, artificial
  Oligomer
ugagccuggaguacaaagu

SEQ ID NO: 5507 - RNA, 19 nt, artificial
  Oligomer
uuugaauucuugcaggcug

SEQ ID NO: 5508 - RNA, 19 nt, artificial
  Oligomer
uucuaucggagucaaauag

SEQ ID NO: 5509 - RNA, 19 nt, artificial
  Oligomer
uugacuuccaugaugcaca

SEQ ID NO: 5510 - RNA, 19 nt, artificial
  Oligomer
cugagccuggaguacaaag

SEQ ID NO: 5511 - RNA, 19 nt, artificial
  Oligomer
ucuaucggagucaaauagg

SEQ ID NO: 5512 - RNA, 19 nt, artificial
  Oligomer
ucauacagccuguuugucc

SEQ ID NO: 5513 - RNA, 19 nt, artificial
  Oligomer
uccagauacaacaugacug

SEQ ID NO: 5514 - RNA, 19 nt, artificial
  Oligomer
acagaauuuguguuucucc

SEQ ID NO: 5515 - RNA, 19 nt, artificial
  Oligomer
uugaaggacucauacagcc

SEQ ID NO: 5516 - RNA, 19 nt, artificial
  Oligomer
uuucuucuccuuguuggcc

SEQ ID NO: 5517 - RNA, 19 nt, artificial
  Oligomer
uuucugcucaggagcacug

SEQ ID NO: 5518 - RNA, 19 nt, artificial
  Oligomer
agccuggaguacaaaguuc

SEQ ID NO: 5519 - RNA, 19 nt, artificial
  Oligomer
uggaguacaaaguucacag

SEQ ID NO: 5520 - RNA, 19 nt, artificial
  Oligomer
uucuccaaaaguaucucag

SEQ ID NO: 5521 - RNA, 19 nt, artificial
  Oligomer
acuuccaugaugcacacgg

SEQ ID NO: 5522 - RNA, 19 nt, artificial
  Oligomer
uucuggugccuguacauga

SEQ ID NO: 5523 - RNA, 19 nt, artificial
  Oligomer
uuucuggugccuguacaug

SEQ ID NO: 5524 - RNA, 19 nt, artificial
  Oligomer
uuucuuuucuggugccugu

SEQ ID NO: 5525 - RNA, 19 nt, artificial
  Oligomer
ucuauagugaaaaaaaggg

SEQ ID NO: 5526 - RNA, 19 nt, artificial
  Oligomer
uuuguguuucuccaaaagu

SEQ ID NO: 5527 - RNA, 19 nt, artificial
  Oligomer
uaucggagucaaauagggc

SEQ ID NO: 5528 - RNA, 19 nt, artificial
  Oligomer
uucucauugucacacuccu

SEQ ID NO: 5529 - RNA, 19 nt, artificial
  Oligomer
ucgacagccucuuagaacc

SEQ ID NO: 5530 - RNA, 19 nt, artificial
  Oligomer
ucucauugucacacuccuc

SEQ ID NO: 5531 - RNA, 19 nt, artificial
  Oligomer
uccaggaaaaacaagauuc

SEQ ID NO: 5532 - RNA, 19 nt, artificial
  Oligomer
uucuucuccuuguuggcca

SEQ ID NO: 5533 - RNA, 19 nt, artificial
  Oligomer
uucaugucauucuugccca

SEQ ID NO: 5534 - RNA, 19 nt, artificial
  Oligomer
uacagaauuuguguuucuc

SEQ ID NO: 5535 - RNA, 19 nt, artificial
  Oligomer
ugugcagccagauaguguc

SEQ ID NO: 5536 - RNA, 19 nt, artificial
  Oligomer
ugcaauggucuuaaacugc

SEQ ID NO: 5537 - RNA, 19 nt, artificial
  Oligomer
ucaaauagggcaaagaauc

SEQ ID NO: 5538 - RNA, 19 nt, artificial
  Oligomer
uuguguuucuccaaaagua

SEQ ID NO: 5539 - RNA, 19 nt, artificial
  Oligomer
uucuccaggaaaaacaaga

SEQ ID NO: 5540 - RNA, 19 nt, artificial
  Oligomer
uguuucuccaaaaguaucu

SEQ ID NO: 5541 - RNA, 19 nt, artificial
  Oligomer
uuccagauacaacaugacu

SEQ ID NO: 5542 - RNA, 19 nt, artificial
  Oligomer
uagaacaccucaaaguggc

SEQ ID NO: 5543 - RNA, 19 nt, artificial
  Oligomer
uugauccagauaaagucca

SEQ ID NO: 5544 - RNA, 19 nt, artificial
  Oligomer
augucauucuugcccagug

SEQ ID NO: 5545 - RNA, 19 nt, artificial
  Oligomer
ugccuguacaugauacucu

SEQ ID NO: 5546 - RNA, 19 nt, artificial
  Oligomer
uggagcuucauguugucuu

SEQ ID NO: 5547 - RNA, 19 nt, artificial
  Oligomer
uugagaccucggauaagcc

SEQ ID NO: 5548 - RNA, 19 nt, artificial
  Oligomer
uguugucuuggacaccuuc

SEQ ID NO: 5549 - RNA, 19 nt, artificial
  Oligomer
auccagauaaaguccaccu

SEQ ID NO: 5550 - RNA, 19 nt, artificial
  Oligomer
aucggagucaaauagggca

SEQ ID NO: 5551 - RNA, 19 nt, artificial
  Oligomer
ucugaagccgaacuucuca

SEQ ID NO: 5552 - RNA, 19 nt, artificial
  Oligomer
augaaagaugagcagaagc

SEQ ID NO: 5553 - RNA, 19 nt, artificial
  Oligomer
guugucuuggacaccuucg

SEQ ID NO: 5554 - RNA, 19 nt, artificial
  Oligomer
uuggacgaccuuugacucu

SEQ ID NO: 5555 - RNA, 19 nt, artificial
  Oligomer
aaaacaagauuccaggcac

SEQ ID NO: 5556 - RNA, 19 nt, artificial
  Oligomer
ucugaugccuugaaggacu

SEQ ID NO: 5557 - RNA, 19 nt, artificial
  Oligomer
ucuuggaaaaaucugaagc

SEQ ID NO: 5558 - RNA, 19 nt, artificial
  Oligomer
uucacaugcagagcugcuu

SEQ ID NO: 5559 - RNA, 19 nt, artificial
  Oligomer
ucgauguagcacuugaugu

SEQ ID NO: 5560 - RNA, 19 nt, artificial
  Oligomer
uugacucuuucucauuguc

SEQ ID NO: 5561 - RNA, 19 nt, artificial
  Oligomer
uugaauucuugcaggcuga

SEQ ID NO: 5562 - RNA, 19 nt, artificial
  Oligomer
uaugcuuucuuuucuggug

SEQ ID NO: 5563 - RNA, 19 nt, artificial
  Oligomer
augugcagccagauagugu

SEQ ID NO: 5564 - RNA, 19 nt, artificial
  Oligomer
aaucgcucugcaaagaagg

SEQ ID NO: 5565 - RNA, 19 nt, artificial
  Oligomer
aucugaagccgaacuucuc

SEQ ID NO: 5566 - RNA, 19 nt, artificial
  Oligomer
uucucuuggaaaaaucuga

SEQ ID NO: 5567 - RNA, 19 nt, artificial
  Oligomer
guacauaugcagcuccagg

SEQ ID NO: 5568 - RNA, 19 nt, artificial
  Oligomer
aaacaagauuccaggcacc

SEQ ID NO: 5569 - RNA, 19 nt, artificial
  Oligomer
cuuucuuuucuggugccug

SEQ ID NO: 5570 - RNA, 19 nt, artificial
  Oligomer
augcuuucuuuucuggugc

SEQ ID NO: 5571 - RNA, 19 nt, artificial
  Oligomer
ugucuuucugcucaggagc

SEQ ID NO: 5572 - RNA, 19 nt, artificial
  Oligomer
uuucacaugcagagcugcu

SEQ ID NO: 5573 - RNA, 19 nt, artificial
  Oligomer
uuggacaccuucgauccag

SEQ ID NO: 5574 - RNA, 19 nt, artificial
  Oligomer
aaaaacaagauuccaggca

SEQ ID NO: 5575 - RNA, 19 nt, artificial
  Oligomer
ucuuuucuggugccuguac

SEQ ID NO: 5576 - RNA, 19 nt, artificial
  Oligomer
acagccucuuagaaccacg

SEQ ID NO: 5577 - RNA, 19 nt, artificial
  Oligomer
uguucugguccagugguag

SEQ ID NO: 5578 - RNA, 19 nt, artificial
  Oligomer
uucuuuucuggugccugua

SEQ ID NO: 5579 - RNA, 19 nt, artificial
  Oligomer
acacacaucgaugucauac

SEQ ID NO: 5580 - RNA, 19 nt, artificial
  Oligomer
agcugcuuugaauucuugc

SEQ ID NO: 5581 - RNA, 19 nt, artificial
  Oligomer
ucucuguugauccagauaa

SEQ ID NO: 5582 - RNA, 19 nt, artificial
  Oligomer
augaacaugaggaggagca

SEQ ID NO: 5583 - RNA, 19 nt, artificial
  Oligomer
uaaggcccaucgauguagc

SEQ ID NO: 5584 - RNA, 19 nt, artificial
  Oligomer
ugcaccuugcccuucuucu

SEQ ID NO: 5585 - RNA, 19 nt, artificial
  Oligomer
aguaucucagagcccuugg

SEQ ID NO: 5586 - RNA, 19 nt, artificial
  Oligomer
ugucauguacauaugcagc

SEQ ID NO: 5587 - RNA, 19 nt, artificial
  Oligomer
ucauguugucuuggacacc

SEQ ID NO: 5588 - RNA, 19 nt, artificial
  Oligomer
uggaagaggaauuugaguu

SEQ ID NO: 5589 - RNA, 19 nt, artificial
  Oligomer
aggaaaaacaagauuccag

SEQ ID NO: 5590 - RNA, 19 nt, artificial
  Oligomer
uccaguuuagucagcaggc

SEQ ID NO: 5591 - RNA, 19 nt, artificial
  Oligomer
cuccaguuuagucagcagg

SEQ ID NO: 5592 - RNA, 19 nt, artificial
  Oligomer
cuuugacucuuucucauug

SEQ ID NO: 5593 - RNA, 19 nt, artificial
  Oligomer
uacucugcagaauggaagc

SEQ ID NO: 5594 - RNA, 19 nt, artificial
  Oligomer
ugaaagaugagcagaagcc

SEQ ID NO: 5595 - RNA, 19 nt, artificial
  Oligomer
uaaacugcugagucaccca

SEQ ID NO: 5596 - RNA, 19 nt, artificial
  Oligomer
aacaccuugcuccagucag

SEQ ID NO: 5597 - RNA, 19 nt, artificial
  Oligomer
uacagccuguuuguccacu

SEQ ID NO: 5598 - RNA, 19 nt, artificial
  Oligomer
ucauagcgagcaauggugg

SEQ ID NO: 5599 - RNA, 19 nt, artificial
  Oligomer
ucuucuccugcaauggucu

SEQ ID NO: 5600 - RNA, 19 nt, artificial
  Oligomer
auucucuuggaaaaaucug

SEQ ID NO: 5601 - RNA, 19 nt, artificial
  Oligomer
auugagaccucggauaagc

SEQ ID NO: 5602 - RNA, 19 nt, artificial
  Oligomer
uuggaaaaaucugaagccg

SEQ ID NO: 5603 - RNA, 19 nt, artificial
  Oligomer
augacugcauaccagccug

SEQ ID NO: 5604 - RNA, 19 nt, artificial
  Oligomer
ugcucagaggcaaagaucc

SEQ ID NO: 5605 - RNA, 19 nt, artificial
  Oligomer
cuaucggagucaaauaggg

SEQ ID NO: 5606 - RNA, 19 nt, artificial
  Oligomer
aggagaugagugaccuugg

SEQ ID NO: 5607 - RNA, 19 nt, artificial
  Oligomer
uucuucucagcagccacuu

SEQ ID NO: 5608 - RNA, 19 nt, artificial
  Oligomer
uugucuuggacaccuucga

SEQ ID NO: 5609 - RNA, 19 nt, artificial
  Oligomer
auugucacacuccucgaca

SEQ ID NO: 5610 - RNA, 19 nt, artificial
  Oligomer
ucagguucuccaugacucc

SEQ ID NO: 5611 - RNA, 19 nt, artificial
  Oligomer
ucacaauggcccuucagca

SEQ ID NO: 5612 - RNA, 19 nt, artificial
  Oligomer
acaaguagucaccaggucu

SEQ ID NO: 5613 - RNA, 19 nt, artificial
  Oligomer
uugcccuucuucucagcag

SEQ ID NO: 5614 - RNA, 19 nt, artificial
  Oligomer
auggucuuaaacugcugag

SEQ ID NO: 5615 - RNA, 19 nt, artificial
  Oligomer
uuccaugaugcacacggcu

SEQ ID NO: 5616 - RNA, 19 nt, artificial
  Oligomer
gagccuggaguacaaaguu

SEQ ID NO: 5617 - RNA, 19 nt, artificial
  Oligomer
auuugaguuuguccauggg

SEQ ID NO: 5618 - RNA, 19 nt, artificial
  Oligomer
uucauguugucuuggacac

SEQ ID NO: 5619 - RNA, 19 nt, artificial
  Oligomer
uuuagucagcaggcucaca

SEQ ID NO: 5620 - RNA, 19 nt, artificial
  Oligomer
auuuguguuucuccaaaag

SEQ ID NO: 5621 - RNA, 19 nt, artificial
  Oligomer
ucagugagaccaagaaccc

SEQ ID NO: 5622 - RNA, 19 nt, artificial
  Oligomer
cuugaaggacucauacagc

SEQ ID NO: 5623 - RNA, 19 nt, artificial
  Oligomer
uuuucuggugccuguacau

SEQ ID NO: 5624 - RNA, 19 nt, artificial
  Oligomer
aggcuagaaauucucuugg

SEQ ID NO: 5625 - RNA, 19 nt, artificial
  Oligomer
ugccuugaaggacucauac

SEQ ID NO: 5626 - RNA, 19 nt, artificial
  Oligomer
aaaaguaucucagagcccu

SEQ ID NO: 5627 - RNA, 19 nt, artificial
  Oligomer
uucacagugugagccacag

SEQ ID NO: 5628 - RNA, 19 nt, artificial
  Oligomer
augagcagaagccacacga

SEQ ID NO: 5629 - RNA, 19 nt, artificial
  Oligomer
auacaaguagucaccaggu

SEQ ID NO: 5630 - RNA, 19 nt, artificial
  Oligomer
cucuuucucauugucacac

SEQ ID NO: 5631 - RNA, 19 nt, artificial
  Oligomer
augaggagaugagugaccu

SEQ ID NO: 5632 - RNA, 19 nt, artificial
  Oligomer
uguucagauacaaguaguc

SEQ ID NO: 5633 - RNA, 19 nt, artificial
  Oligomer
ucacaugcagagcugcuuu

SEQ ID NO: 5634 - RNA, 19 nt, artificial
  Oligomer
ucggagucaaauagggcaa

SEQ ID NO: 5635 - RNA, 19 nt, artificial
  Oligomer
uggauguucugguccagug

SEQ ID NO: 5636 - RNA, 19 nt, artificial
  Oligomer
uacaccuggaagaggaauu

SEQ ID NO: 5637 - RNA, 19 nt, artificial
  Oligomer
uugggcccaugaaagauga

SEQ ID NO: 5638 - RNA, 19 nt, artificial
  Oligomer
uggaacuggauguucuggu

SEQ ID NO: 5639 - RNA, 19 nt, artificial
  Oligomer
ucuuucucauugucacacu

SEQ ID NO: 5640 - RNA, 19 nt, artificial
  Oligomer
acagccuguuuguccacug

SEQ ID NO: 5641 - RNA, 19 nt, artificial
  Oligomer
augauacucugcagaaugg

SEQ ID NO: 5642 - RNA, 19 nt, artificial
  Oligomer
cuguacaugauacucugca

SEQ ID NO: 5643 - RNA, 19 nt, artificial
  Oligomer
auagugucuuucugcucag

SEQ ID NO: 5644 - RNA, 19 nt, artificial
  Oligomer
uggaaaaaucugaagccga

SEQ ID NO: 5645 - RNA, 19 nt, artificial
  Oligomer
uugcccagugcagauguca

SEQ ID NO: 5646 - RNA, 19 nt, artificial
  Oligomer
aaagaaucgcucugcaaag

SEQ ID NO: 5647 - RNA, 19 nt, artificial
  Oligomer
caugauacucugcagaaug

SEQ ID NO: 5648 - RNA, 19 nt, artificial
  Oligomer
uagugucuuucugcucagg

SEQ ID NO: 5649 - RNA, 19 nt, artificial
  Oligomer
aaccacucgaaagaccgcu

SEQ ID NO: 5650 - RNA, 19 nt, artificial
  Oligomer
auaugcagcuccaggaagc

SEQ ID NO: 5651 - RNA, 19 nt, artificial
  Oligomer
ucuugcccagugcagaugu

SEQ ID NO: 5652 - RNA, 19 nt, artificial
  Oligomer
ugacucuuucucauuguca

SEQ ID NO: 5653 - RNA, 19 nt, artificial
  Oligomer
uucauucuugaagucagug

SEQ ID NO: 5654 - RNA, 19 nt, artificial
  Oligomer
acuagaaggacuaagggcu

SEQ ID NO: 5655 - RNA, 19 nt, artificial
  Oligomer
ucuuaaacugcugagucac

SEQ ID NO: 5656 - RNA, 19 nt, artificial
  Oligomer
uguacaugauacucugcag

SEQ ID NO: 5657 - RNA, 19 nt, artificial
  Oligomer
uggacgaccuuugacucuu

SEQ ID NO: 5658 - RNA, 19 nt, artificial
  Oligomer
gaacuucucacaauggccc

SEQ ID NO: 5659 - RNA, 19 nt, artificial
  Oligomer
uguguuucuccaaaaguau

SEQ ID NO: 5660 - RNA, 19 nt, artificial
  Oligomer
ucagcagccacuuucugga

SEQ ID NO: 5661 - RNA, 19 nt, artificial
  Oligomer
ucuccugcaauggucuuaa

SEQ ID NO: 5662 - RNA, 19 nt, artificial
  Oligomer
aacaugaggaggagcagca

SEQ ID NO: 5663 - RNA, 19 nt, artificial
  Oligomer
acaucgaugucauacaccu

SEQ ID NO: 5664 - RNA, 19 nt, artificial
  Oligomer
auggagucuuucuucuccu

SEQ ID NO: 5665 - RNA, 19 nt, artificial
  Oligomer
ugcggcuucauucuugaag

SEQ ID NO: 5666 - RNA, 19 nt, artificial
  Oligomer
aagcugguggaacuggaug

SEQ ID NO: 5667 - RNA, 19 nt, artificial
  Oligomer
cuuggacgaccuuugacuc

SEQ ID NO: 5668 - RNA, 19 nt, artificial
  Oligomer
augucauacaccuggaaga

SEQ ID NO: 5669 - RNA, 19 nt, artificial
  Oligomer
ucucagcagccacuuucug

SEQ ID NO: 5670 - RNA, 19 nt, artificial
  Oligomer
uggugccuguacaugauac

SEQ ID NO: 5671 - RNA, 19 nt, artificial
  Oligomer
aaaaaucugaagccgaacu

SEQ ID NO: 5672 - RNA, 19 nt, artificial
  Oligomer
aucuccaguuuagucagca

SEQ ID NO: 5673 - RNA, 19 nt, artificial
  Oligomer
caaaccacucgaaagaccg

SEQ ID NO: 5674 - RNA, 19 nt, artificial
  Oligomer
ugcaaagaaggacucuuuc

SEQ ID NO: 5675 - RNA, 19 nt, artificial
  Oligomer
uccagauaaaguccaccuu

SEQ ID NO: 5676 - RNA, 19 nt, artificial
  Oligomer
uuggagaggugaggcuaga

SEQ ID NO: 5677 - RNA, 19 nt, artificial
  Oligomer
agccgaacuucucacaaug

SEQ ID NO: 5678 - RNA, 19 nt, artificial
  Oligomer
uggaacaccuugcuccagu

SEQ ID NO: 5679 - RNA, 19 nt, artificial
  Oligomer
uucugguccagugguagga

SEQ ID NO: 5680 - RNA, 19 nt, artificial
  Oligomer
guugacuuccaugaugcac

SEQ ID NO: 5681 - RNA, 19 nt, artificial
  Oligomer
aaaguccaccuuauggagc

SEQ ID NO: 5682 - RNA, 19 nt, artificial
  Oligomer
cucgacagccucuuagaac

SEQ ID NO: 5683 - RNA, 19 nt, artificial
  Oligomer
guugggcccaugaaagaug

SEQ ID NO: 5684 - RNA, 19 nt, artificial
  Oligomer
ucuccaguuuagucagcag

SEQ ID NO: 5685 - RNA, 19 nt, artificial
  Oligomer
aauggucuuaaacugcuga

SEQ ID NO: 5686 - RNA, 19 nt, artificial
  Oligomer
ucauucuugcccagugcag

SEQ ID NO: 5687 - RNA, 19 nt, artificial
  Oligomer
uucauaggcgucguccgua

SEQ ID NO: 5688 - RNA, 19 nt, artificial
  Oligomer
ugcacacacaucgauguca

SEQ ID NO: 5689 - RNA, 19 nt, artificial
  Oligomer
augucauguacauaugcag

SEQ ID NO: 5690 - RNA, 19 nt, artificial
  Oligomer
caauggauugagaccucgg

SEQ ID NO: 5691 - RNA, 19 nt, artificial
  Oligomer
auaaaguccaccuuaugga

SEQ ID NO: 5692 - RNA, 19 nt, artificial
  Oligomer
cuugaugaggagaugagug

SEQ ID NO: 5693 - RNA, 19 nt, artificial
  Oligomer
uucucacaauggcccuuca

SEQ ID NO: 5694 - RNA, 19 nt, artificial
  Oligomer
ugaggcuagaaauucucuu

SEQ ID NO: 5695 - RNA, 19 nt, artificial
  Oligomer
ucugcaaagaaggacucuu

SEQ ID NO: 5696 - RNA, 19 nt, artificial
  Oligomer
uccugcaauggucuuaaac

SEQ ID NO: 5697 - RNA, 19 nt, artificial
  Oligomer
aauuccagauacaacauga

SEQ ID NO: 5698 - RNA, 19 nt, artificial
  Oligomer
gccuggaguacaaaguuca

SEQ ID NO: 5699 - RNA, 19 nt, artificial
  Oligomer
guugauccagauaaagucc

SEQ ID NO: 5700 - RNA, 19 nt, artificial
  Oligomer
aggacuaagggcuucauag

SEQ ID NO: 5701 - RNA, 19 nt, artificial
  Oligomer
gauggugccacuucuaucg

SEQ ID NO: 5702 - RNA, 19 nt, artificial
  Oligomer
cgaccuuugacucuuucuc

SEQ ID NO: 5703 - RNA, 19 nt, artificial
  Oligomer
auagaacaccucaaagugg

SEQ ID NO: 5704 - RNA, 19 nt, artificial
  Oligomer
aagaugagcagaagccaca

SEQ ID NO: 5705 - RNA, 19 nt, artificial
  Oligomer
acaacaugacugcauacca

SEQ ID NO: 5706 - RNA, 19 nt, artificial
  Oligomer
ggaaaaacaagauuccagg

SEQ ID NO: 5707 - RNA, 19 nt, artificial
  Oligomer
acaagauuccaggcaccag

SEQ ID NO: 5708 - RNA, 19 nt, artificial
  Oligomer
agccacuuccagaaguugg

SEQ ID NO: 5709 - RNA, 19 nt, artificial
  Oligomer
ccuuggacgaccuuugacu

SEQ ID NO: 5710 - RNA, 19 nt, artificial
  Oligomer
uucuccuuguuggccagga

SEQ ID NO: 5711 - RNA, 19 nt, artificial
  Oligomer
aguccaauagaacaccuca

SEQ ID NO: 5712 - RNA, 19 nt, artificial
  Oligomer
aguuuagucagcaggcuca

SEQ ID NO: 5713 - RNA, 19 nt, artificial
  Oligomer
uccagugguaggacuugag

SEQ ID NO: 5714 - RNA, 19 nt, artificial
  Oligomer
auuccagauacaacaugac

SEQ ID NO: 5715 - RNA, 19 nt, artificial
  Oligomer
cagaauuuguguuucucca

SEQ ID NO: 5716 - RNA, 19 nt, artificial
  Oligomer
aaaguucacagugugagcc

SEQ ID NO: 5717 - RNA, 19 nt, artificial
  Oligomer
cugcaauggucuuaaacug

SEQ ID NO: 5718 - RNA, 19 nt, artificial
  Oligomer
cgaaugugcagccagauag

SEQ ID NO: 5719 - RNA, 19 nt, artificial
  Oligomer
gacucauacagccuguuug

SEQ ID NO: 5720 - RNA, 19 nt, artificial
  Oligomer
gucuauagugaaaaaaagg

SEQ ID NO: 5721 - RNA, 19 nt, artificial
  Oligomer
cugauggucagguucucca

SEQ ID NO: 5722 - RNA, 19 nt, artificial
  Oligomer
aaucugaagccgaacuucu

SEQ ID NO: 5723 - RNA, 19 nt, artificial
  Oligomer
auggauugagaccucggau

SEQ ID NO: 5724 - RNA, 19 nt, artificial
  Oligomer
cuggaguacaaaguucaca

SEQ ID NO: 5725 - RNA, 19 nt, artificial
  Oligomer
ucuggaacaccuugcucca

SEQ ID NO: 5726 - RNA, 19 nt, artificial
  Oligomer
ucugcggcuucauucuuga

SEQ ID NO: 5727 - RNA, 19 nt, artificial
  Oligomer
acgaccuuugacucuuucu

SEQ ID NO: 5728 - RNA, 19 nt, artificial
  Oligomer
ugcagaauggaagcaaagg

SEQ ID NO: 5729 - RNA, 19 nt, artificial
  Oligomer
gucagguucuccaugacuc

SEQ ID NO: 5730 - RNA, 19 nt, artificial
  Oligomer
ugguggaacuggauguucu

SEQ ID NO: 5731 - RNA, 19 nt, artificial
  Oligomer
ucccauaaggcccaucgau

SEQ ID NO: 5732 - RNA, 19 nt, artificial
  Oligomer
aaguaugcuuucuuuucug

SEQ ID NO: 5733 - RNA, 19 nt, artificial
  Oligomer
agucgaaguugaggcacug

SEQ ID NO: 5734 - RNA, 19 nt, artificial
  Oligomer
uagcaaaagcgcaacuaga

SEQ ID NO: 5735 - RNA, 19 nt, artificial
  Oligomer
cacaucgaugucauacacc

SEQ ID NO: 5736 - RNA, 19 nt, artificial
  Oligomer
uuguuggccaggaggucaa

SEQ ID NO: 5737 - RNA, 19 nt, artificial
  Oligomer
ugucauacaccuggaagag

SEQ ID NO: 5738 - RNA, 19 nt, artificial
  Oligomer
aauagaacaccucaaagug

SEQ ID NO: 5739 - RNA, 19 nt, artificial
  Oligomer
ugcuuugaauucuugcagg

SEQ ID NO: 5740 - RNA, 19 nt, artificial
  Oligomer
ugaguccaauagaacaccu

SEQ ID NO: 5741 - RNA, 19 nt, artificial
  Oligomer
cugaagccgaacuucucac

SEQ ID NO: 5742 - RNA, 19 nt, artificial
  Oligomer
agcaggcucacaaaccacu

SEQ ID NO: 5743 - RNA, 19 nt, artificial
  Oligomer
aggaauuugaguuugucca

SEQ ID NO: 5744 - RNA, 19 nt, artificial
  Oligomer
ucgaugucauacaccugga

SEQ ID NO: 5745 - RNA, 19 nt, artificial
  Oligomer
uccucgacagccucuuaga

SEQ ID NO: 5746 - RNA, 19 nt, artificial
  Oligomer
augccuugaaggacucaua

SEQ ID NO: 5747 - RNA, 19 nt, artificial
  Oligomer
uugucacacuccucgacag

SEQ ID NO: 5748 - RNA, 19 nt, artificial
  Oligomer
uccaauagaacaccucaaa

SEQ ID NO: 5749 - RNA, 19 nt, artificial
  Oligomer
uaggacaggugaguccaau

SEQ ID NO: 5750 - RNA, 19 nt, artificial
  Oligomer
ucuugaagucagugagacc

SEQ ID NO: 5751 - RNA, 19 nt, artificial
  Oligomer
cgaacuucucacaauggcc

SEQ ID NO: 5752 - RNA, 19 nt, artificial
  Oligomer
auggagcuucauguugucu

SEQ ID NO: 5753 - RNA, 19 nt, artificial
  Oligomer
cuuucucauugucacacuc

SEQ ID NO: 5754 - RNA, 19 nt, artificial
  Oligomer
auucuugcccagugcagau

SEQ ID NO: 5755 - RNA, 19 nt, artificial
  Oligomer
gauccagauaaaguccacc

SEQ ID NO: 5756 - RNA, 19 nt, artificial
  Oligomer
ccaagaacccaccaauucc

SEQ ID NO: 5757 - RNA, 19 nt, artificial
  Oligomer
ucuguugauccagauaaag

SEQ ID NO: 5758 - RNA, 19 nt, artificial
  Oligomer
uacaugauacucugcagaa

SEQ ID NO: 5759 - RNA, 19 nt, artificial
  Oligomer
auggccuucaugucauucu

SEQ ID NO: 5760 - RNA, 19 nt, artificial
  Oligomer
cuugaagucagugagacca

SEQ ID NO: 5761 - RNA, 19 nt, artificial
  Oligomer
ucacagugugagccacagu

SEQ ID NO: 5762 - RNA, 19 nt, artificial
  Oligomer
auacaacaugacugcauac

SEQ ID NO: 5763 - RNA, 19 nt, artificial
  Oligomer
ucgcucugcaaagaaggac

SEQ ID NO: 5764 - RNA, 19 nt, artificial
  Oligomer
cuugcccuucuucucagca

SEQ ID NO: 5765 - RNA, 19 nt, artificial
  Oligomer
ucauacaccuggaagagga

SEQ ID NO: 5766 - RNA, 19 nt, artificial
  Oligomer
ucuccaaaaguaucucaga

SEQ ID NO: 5767 - RNA, 19 nt, artificial
  Oligomer
uagggcaaagaaucgcucu

SEQ ID NO: 5768 - RNA, 19 nt, artificial
  Oligomer
gucugcggcuucauucuug

SEQ ID NO: 5769 - RNA, 19 nt, artificial
  Oligomer
ugcagccagauagugucuu

SEQ ID NO: 5770 - RNA, 19 nt, artificial
  Oligomer
gauaaaguccaccuuaugg

SEQ ID NO: 5771 - RNA, 19 nt, artificial
  Oligomer
caccuuauggagcuucaug

SEQ ID NO: 5772 - RNA, 19 nt, artificial
  Oligomer
aacaagauuccaggcacca

SEQ ID NO: 5773 - RNA, 19 nt, artificial
  Oligomer
accuugcccuucuucucag

SEQ ID NO: 5774 - RNA, 19 nt, artificial
  Oligomer
aaaguaucucagagcccuu

SEQ ID NO: 5775 - RNA, 19 nt, artificial
  Oligomer
agguugacuuccaugaugc

SEQ ID NO: 5776 - RNA, 19 nt, artificial
  Oligomer
guccaucuccaguuuaguc

SEQ ID NO: 5777 - RNA, 19 nt, artificial
  Oligomer
acagaagaagaccugcacc

SEQ ID NO: 5778 - RNA, 19 nt, artificial
  Oligomer
auggucagguucuccauga

SEQ ID NO: 5779 - RNA, 19 nt, artificial
  Oligomer
agauaaaguccaccuuaug

SEQ ID NO: 5780 - RNA, 19 nt, artificial
  Oligomer
ugaaggacucauacagccu

SEQ ID NO: 5781 - RNA, 19 nt, artificial
  Oligomer
cucacaaaccacucgaaag

SEQ ID NO: 5782 - RNA, 19 nt, artificial
  Oligomer
auaagcugguggaacugga

SEQ ID NO: 5783 - RNA, 19 nt, artificial
  Oligomer
ugcagagcugcuuugaauu

SEQ ID NO: 5784 - RNA, 19 nt, artificial
  Oligomer
ucaugucauucuugcccag

SEQ ID NO: 5785 - RNA, 19 nt, artificial
  Oligomer
cauguugucuuggacaccu

SEQ ID NO: 5786 - RNA, 19 nt, artificial
  Oligomer
gucagugagaccaagaacc

SEQ ID NO: 5787 - RNA, 19 nt, artificial
  Oligomer
aaggccauagcaaaagcgc

SEQ ID NO: 5788 - RNA, 19 nt, artificial
  Oligomer
uagucaccaggucuauagu

SEQ ID NO: 5789 - RNA, 19 nt, artificial
  Oligomer
agucaccaggucuauagug

SEQ ID NO: 5790 - RNA, 19 nt, artificial
  Oligomer
aacaccucaaaguggccac

SEQ ID NO: 5791 - RNA, 19 nt, artificial
  Oligomer
auggugccacuucuaucgg

SEQ ID NO: 5792 - RNA, 19 nt, artificial
  Oligomer
caccuugcccuucuucuca

SEQ ID NO: 5793 - RNA, 19 nt, artificial
  Oligomer
acaugacugcauaccagcc

SEQ ID NO: 5794 - RNA, 19 nt, artificial
  Oligomer
aauagggcaaagaaucgcu

SEQ ID NO: 5795 - RNA, 19 nt, artificial
  Oligomer
cucagaggcaaagauccug

SEQ ID NO: 5796 - RNA, 19 nt, artificial
  Oligomer
auacagccuguuuguccac

SEQ ID NO: 5797 - RNA, 19 nt, artificial
  Oligomer
gauggagucuuucuucucc

SEQ ID NO: 5798 - RNA, 19 nt, artificial
  Oligomer
aaaaucugaagccgaacuu

SEQ ID NO: 5799 - RNA, 19 nt, artificial
  Oligomer
guguuucuccaaaaguauc

SEQ ID NO: 5800 - RNA, 19 nt, artificial
  Oligomer
cacuuucuggaacaccuug

SEQ ID NO: 5801 - RNA, 19 nt, artificial
  Oligomer
caucgaugucauacaccug

SEQ ID NO: 5802 - RNA, 19 nt, artificial
  Oligomer
gccuucaugucauucuugc

SEQ ID NO: 5803 - RNA, 19 nt, artificial
  Oligomer
acaaaguucacagugugag

SEQ ID NO: 5804 - RNA, 19 nt, artificial
  Oligomer
uaaaguccaccuuauggag

SEQ ID NO: 5805 - RNA, 19 nt, artificial
  Oligomer
gaaguugggcccaugaaag

SEQ ID NO: 5806 - RNA, 19 nt, artificial
  Oligomer
aaugugcagccagauagug

SEQ ID NO: 5807 - RNA, 19 nt, artificial
  Oligomer
ugccacuucuaucggaguc

SEQ ID NO: 5808 - RNA, 19 nt, artificial
  Oligomer
acaaaccacucgaaagacc

SEQ ID NO: 5809 - RNA, 19 nt, artificial
  Oligomer
gauacaaguagucaccagg

SEQ ID NO: 5810 - RNA, 19 nt, artificial
  Oligomer
augcagagcugcuuugaau

SEQ ID NO: 5811 - RNA, 19 nt, artificial
  Oligomer
auagcaaaagcgcaacuag

SEQ ID NO: 5812 - RNA, 19 nt, artificial
  Oligomer
cuucuucucagcagccacu

SEQ ID NO: 5813 - RNA, 19 nt, artificial
  Oligomer
ugauacucugcagaaugga

SEQ ID NO: 5814 - RNA, 19 nt, artificial
  Oligomer
ucagcaggcucacaaacca

SEQ ID NO: 5815 - RNA, 19 nt, artificial
  Oligomer
acucuuucucauugucaca

SEQ ID NO: 5816 - RNA, 19 nt, artificial
  Oligomer
cagccagauagugucuuuc

SEQ ID NO: 5817 - RNA, 19 nt, artificial
  Oligomer
cuuucuggaacaccuugcu

SEQ ID NO: 5818 - RNA, 19 nt, artificial
  Oligomer
cuuucugcucaggagcacu

SEQ ID NO: 5819 - RNA, 19 nt, artificial
  Oligomer
gaaaaacaagauuccaggc

SEQ ID NO: 5820 - RNA, 19 nt, artificial
  Oligomer
ugaacaugaggaggagcag

SEQ ID NO: 5821 - RNA, 19 nt, artificial
  Oligomer
acucauacagccuguuugu

SEQ ID NO: 5822 - RNA, 19 nt, artificial
  Oligomer
uucuugaagucagugagac

SEQ ID NO: 5823 - RNA, 19 nt, artificial
  Oligomer
aggccaauggccuucaugu

SEQ ID NO: 5824 - RNA, 19 nt, artificial
  Oligomer
ugauccagauaaaguccac

SEQ ID NO: 5825 - RNA, 19 nt, artificial
  Oligomer
acuaagggcuucauaggcg

SEQ ID NO: 5826 - RNA, 19 nt, artificial
  Oligomer
ucuucuccuuguuggccag

SEQ ID NO: 5827 - RNA, 19 nt, artificial
  Oligomer
ucacaaaccacucgaaaga

SEQ ID NO: 5828 - RNA, 19 nt, artificial
  Oligomer
cuccaaaaguaucucagag

SEQ ID NO: 5829 - RNA, 19 nt, artificial
  Oligomer
ugggucugaugccuugaag

SEQ ID NO: 5830 - RNA, 19 nt, artificial
  Oligomer
acaccuucgauccaggagu

SEQ ID NO: 5831 - RNA, 19 nt, artificial
  Oligomer
aaagaugagcagaagccac

SEQ ID NO: 5832 - RNA, 19 nt, artificial
  Oligomer
agaugucauguacauaugc

SEQ ID NO: 5833 - RNA, 19 nt, artificial
  Oligomer
cuucuaucggagucaaaua

SEQ ID NO: 5834 - RNA, 19 nt, artificial
  Oligomer
caaguaugcuuucuuuucu

SEQ ID NO: 5835 - RNA, 19 nt, artificial
  Oligomer
aacuucucacaauggcccu

SEQ ID NO: 5836 - RNA, 19 nt, artificial
  Oligomer
cugcuuugaauucuugcag

SEQ ID NO: 5837 - RNA, 19 nt, artificial
  Oligomer
aggagguugacuuccauga

SEQ ID NO: 5838 - RNA, 19 nt, artificial
  Oligomer
ugcagucgaaguugaggca

SEQ ID NO: 5839 - RNA, 19 nt, artificial
  Oligomer
caccaauuccagauacaac

SEQ ID NO: 5840 - RNA, 19 nt, artificial
  Oligomer
aguaugcuuucuuuucugg

SEQ ID NO: 5841 - RNA, 19 nt, artificial
  Oligomer
ccuucaugucauucuugcc

SEQ ID NO: 5842 - RNA, 19 nt, artificial
  Oligomer
auguugucuuggacaccuu

SEQ ID NO: 5843 - RNA, 19 nt, artificial
  Oligomer
ccaaaaguaucucagagcc

SEQ ID NO: 5844 - RNA, 19 nt, artificial
  Oligomer
caaaaguaucucagagccc

SEQ ID NO: 5845 - RNA, 19 nt, artificial
  Oligomer
agccacuuucuggaacacc

SEQ ID NO: 5846 - RNA, 19 nt, artificial
  Oligomer
uguacauaugcagcuccag

SEQ ID NO: 5847 - RNA, 19 nt, artificial
  Oligomer
agccagauagugucuuucu

SEQ ID NO: 5848 - RNA, 19 nt, artificial
  Oligomer
uaagggcuucauaggcguc

SEQ ID NO: 5849 - RNA, 19 nt, artificial
  Oligomer
cuucauguugucuuggaca

SEQ ID NO: 5850 - RNA, 19 nt, artificial
  Oligomer
ugguccaucuccaguuuag

SEQ ID NO: 5851 - RNA, 19 nt, artificial
  Oligomer
aggugaggcuagaaauucu

SEQ ID NO: 5852 - RNA, 19 nt, artificial
  Oligomer
ugaagcugcagucgaaguu

SEQ ID NO: 5853 - RNA, 19 nt, artificial
  Oligomer
cuuugaauucuugcaggcu

SEQ ID NO: 5854 - RNA, 19 nt, artificial
  Oligomer
ucuggugccuguacaugau

SEQ ID NO: 5855 - RNA, 19 nt, artificial
  Oligomer
gaggagguugacuuccaug

SEQ ID NO: 5856 - RNA, 19 nt, artificial
  Oligomer
auggaugagcagggucagu

SEQ ID NO: 5857 - RNA, 19 nt, artificial
  Oligomer
ugacuuccaugaugcacac

SEQ ID NO: 5858 - RNA, 19 nt, artificial
  Oligomer
ccagauagugucuuucugc

SEQ ID NO: 5859 - RNA, 19 nt, artificial
  Oligomer
aauggccuucaugucauuc

SEQ ID NO: 5860 - RNA, 19 nt, artificial
  Oligomer
ccaggaaaaacaagauucc

SEQ ID NO: 5861 - RNA, 19 nt, artificial
  Oligomer
uccaccuuauggagcuuca

SEQ ID NO: 5862 - RNA, 19 nt, artificial
  Oligomer
gaugucauacaccuggaag

SEQ ID NO: 5863 - RNA, 19 nt, artificial
  Oligomer
cauacagccuguuugucca

SEQ ID NO: 5864 - RNA, 19 nt, artificial
  Oligomer
agugucuuucugcucagga

SEQ ID NO: 5865 - RNA, 19 nt, artificial
  Oligomer
guggaacuggauguucugg

SEQ ID NO: 5866 - RNA, 19 nt, artificial
  Oligomer
cuguuuguccacuggccuu

SEQ ID NO: 5867 - RNA, 19 nt, artificial
  Oligomer
cuuggaaaaaucugaagcc

SEQ ID NO: 5868 - RNA, 19 nt, artificial
  Oligomer
ugaugaggagaugagugac

SEQ ID NO: 5869 - RNA, 19 nt, artificial
  Oligomer
uaagcugguggaacuggau

SEQ ID NO: 5870 - RNA, 19 nt, artificial
  Oligomer
uacaaaguucacaguguga

SEQ ID NO: 5871 - RNA, 19 nt, artificial
  Oligomer
agcugguggaacuggaugu

SEQ ID NO: 5872 - RNA, 19 nt, artificial
  Oligomer
caaaagcgcaacuagaagg

SEQ ID NO: 5873 - RNA, 19 nt, artificial
  Oligomer
gaggaauuugaguuugucc

SEQ ID NO: 5874 - RNA, 19 nt, artificial
  Oligomer
cuuaaacugcugagucacc

SEQ ID NO: 5875 - RNA, 19 nt, artificial
  Oligomer
auguucugguccaguggua

SEQ ID NO: 5876 - RNA, 19 nt, artificial
  Oligomer
guuucuccaaaaguaucuc

SEQ ID NO: 5877 - RNA, 19 nt, artificial
  Oligomer
agaaguugggcccaugaaa

SEQ ID NO: 5878 - RNA, 19 nt, artificial
  Oligomer
gucuuucuucuccuuguug

SEQ ID NO: 5879 - RNA, 19 nt, artificial
  Oligomer
guacaugauacucugcaga

SEQ ID NO: 5880 - RNA, 19 nt, artificial
  Oligomer
auguacauaugcagcucca

SEQ ID NO: 5881 - RNA, 19 nt, artificial
  Oligomer
ucuuucugcucaggagcac

SEQ ID NO: 5882 - RNA, 19 nt, artificial
  Oligomer
uugaagucagugagaccaa

SEQ ID NO: 5883 - RNA, 19 nt, artificial
  Oligomer
gaggagaugagugaccuug

SEQ ID NO: 5884 - RNA, 19 nt, artificial
  Oligomer
aagcgcaacuagaaggacu

SEQ ID NO: 5885 - RNA, 19 nt, artificial
  Oligomer
agauacaacaugacugcau

SEQ ID NO: 5886 - RNA, 19 nt, artificial
  Oligomer
accaggucuauagugaaaa

SEQ ID NO: 5887 - RNA, 19 nt, artificial
  Oligomer
ccagauacaacaugacugc

SEQ ID NO: 5888 - RNA, 19 nt, artificial
  Oligomer
gaguacaaaguucacagug

SEQ ID NO: 5889 - RNA, 19 nt, artificial
  Oligomer
auguagcacuugauguuac

SEQ ID NO: 5890 - RNA, 19 nt, artificial
  Oligomer
aaaccacucgaaagaccgc

SEQ ID NO: 5891 - RNA, 19 nt, artificial
  Oligomer
agaauuuguguuucuccaa

SEQ ID NO: 5892 - RNA, 19 nt, artificial
  Oligomer
gucauguacauaugcagcu

SEQ ID NO: 5893 - RNA, 19 nt, artificial
  Oligomer
acuucuaucggagucaaau

SEQ ID NO: 5894 - RNA, 19 nt, artificial
  Oligomer
agugggucugaugccuuga

SEQ ID NO: 5895 - RNA, 19 nt, artificial
  Oligomer
ccgugauggagucuuucuu

SEQ ID NO: 5896 - RNA, 19 nt, artificial
  Oligomer
ccuugaaggacucauacag

SEQ ID NO: 5897 - RNA, 19 nt, artificial
  Oligomer
caaagaaggacucuuucac

SEQ ID NO: 5898 - RNA, 19 nt, artificial
  Oligomer
accuuugacucuuucucau

SEQ ID NO: 5899 - RNA, 19 nt, artificial
  Oligomer
guaugcuuucuuuucuggu

SEQ ID NO: 5900 - RNA, 19 nt, artificial
  Oligomer
gcgcaauggauugagaccu

SEQ ID NO: 5901 - RNA, 19 nt, artificial
  Oligomer
caugucauucuugcccagu

SEQ ID NO: 5902 - RNA, 19 nt, artificial
  Oligomer
ccgaacuucucacaauggc

SEQ ID NO: 5903 - RNA, 19 nt, artificial
  Oligomer
auggccuucuccaggaaaa

SEQ ID NO: 5904 - RNA, 19 nt, artificial
  Oligomer
acgaaggccauagcaaaag

SEQ ID NO: 5905 - RNA, 19 nt, artificial
  Oligomer
aaggacucuuucacaugca

SEQ ID NO: 5906 - RNA, 19 nt, artificial
  Oligomer
gaugaagcugcagucgaag

SEQ ID NO: 5907 - RNA, 19 nt, artificial
  Oligomer
gaggugaggcuagaaauuc

SEQ ID NO: 5908 - RNA, 19 nt, artificial
  Oligomer
cuuuucuggugccuguaca

SEQ ID NO: 5909 - RNA, 19 nt, artificial
  Oligomer
uggugccacuucuaucgga

SEQ ID NO: 5910 - RNA, 19 nt, artificial
  Oligomer
aaaucugaagccgaacuuc

SEQ ID NO: 5911 - RNA, 19 nt, artificial
  Oligomer
acucuuucacaugcagagc

SEQ ID NO: 5912 - RNA, 19 nt, artificial
  Oligomer
uggucucuguugauccaga

SEQ ID NO: 5913 - RNA, 19 nt, artificial
  Oligomer
gaauuugaguuuguccaug

SEQ ID NO: 5914 - RNA, 19 nt, artificial
  Oligomer
aaagaaggacucuuucaca

SEQ ID NO: 5915 - RNA, 19 nt, artificial
  Oligomer
uagcccauaagcuggugga

SEQ ID NO: 5916 - RNA, 19 nt, artificial
  Oligomer
agaugagcagaagccacac

SEQ ID NO: 5917 - RNA, 19 nt, artificial
  Oligomer
aagaacccaccaauuccag

SEQ ID NO: 5918 - RNA, 19 nt, artificial
  Oligomer
gaccuuugacucuuucuca

SEQ ID NO: 5919 - RNA, 19 nt, artificial
  Oligomer
auguucagauacaaguagu

SEQ ID NO: 5920 - RNA, 19 nt, artificial
  Oligomer
aguacaaaguucacagugu

SEQ ID NO: 5921 - RNA, 19 nt, artificial
  Oligomer
cccagugcagaugucaugu

SEQ ID NO: 5922 - RNA, 19 nt, artificial
  Oligomer
ucuucucagcagccacuuu

SEQ ID NO: 5923 - RNA, 19 nt, artificial
  Oligomer
agcugcagucgaaguugag

SEQ ID NO: 5924 - RNA, 19 nt, artificial
  Oligomer
acuggagcagaugaacaug

SEQ ID NO: 5925 - RNA, 19 nt, artificial
  Oligomer
cucauacagccuguuuguc

SEQ ID NO: 5926 - RNA, 19 nt, artificial
  Oligomer
agaaggacucuuucacaug

SEQ ID NO: 5927 - RNA, 19 nt, artificial
  Oligomer
caacaugacugcauaccag

SEQ ID NO: 5928 - RNA, 19 nt, artificial
  Oligomer
ccaauagaacaccucaaag

SEQ ID NO: 5929 - RNA, 19 nt, artificial
  Oligomer
ugguccagugguaggacuu

SEQ ID NO: 5930 - RNA, 19 nt, artificial
  Oligomer
ugcccagugcagaugucau

SEQ ID NO: 5931 - RNA, 19 nt, artificial
  Oligomer
agggcaaagaaucgcucug

SEQ ID NO: 5932 - RNA, 19 nt, artificial
  Oligomer
agugguaggacuugagcca

SEQ ID NO: 5933 - RNA, 19 nt, artificial
  Oligomer
aaguccaccuuauggagcu

SEQ ID NO: 5934 - RNA, 19 nt, artificial
  Oligomer
cuguugauccagauaaagu

SEQ ID NO: 5935 - RNA, 19 nt, artificial
  Oligomer
acacaucgaugucauacac

SEQ ID NO: 5936 - RNA, 19 nt, artificial
  Oligomer
acuucucacaauggcccuu

SEQ ID NO: 5937 - RNA, 19 nt, artificial
  Oligomer
caauggucuuaaacugcug

SEQ ID NO: 5938 - RNA, 19 nt, artificial
  Oligomer
caaagaaucgcucugcaaa

SEQ ID NO: 5939 - RNA, 19 nt, artificial
  Oligomer
aaccguguacccagccaau

SEQ ID NO: 5940 - RNA, 19 nt, artificial
  Oligomer
ggagucuuucuucuccuug

SEQ ID NO: 5941 - RNA, 19 nt, artificial
  Oligomer
ccacucauagcgagcaaug

SEQ ID NO: 5942 - RNA, 19 nt, artificial
  Oligomer
agagcugcuuugaauucuu

SEQ ID NO: 5943 - RNA, 19 nt, artificial
  Oligomer
gccuguacaugauacucug

SEQ ID NO: 5944 - RNA, 19 nt, artificial
  Oligomer
uuccagaaguugggcccau

SEQ ID NO: 5945 - RNA, 19 nt, artificial
  Oligomer
gcaauggauugagaccucg

SEQ ID NO: 5946 - RNA, 19 nt, artificial
  Oligomer
augaagcugcagucgaagu

SEQ ID NO: 5947 - RNA, 19 nt, artificial
  Oligomer
acucauagcgagcaauggu

SEQ ID NO: 5948 - RNA, 19 nt, artificial
  Oligomer
accacguagcccauaagcu

SEQ ID NO: 5949 - RNA, 19 nt, artificial
  Oligomer
cuggauguucugguccagu

SEQ ID NO: 5950 - RNA, 19 nt, artificial
  Oligomer
caguuuagucagcaggcuc

SEQ ID NO: 5951 - RNA, 19 nt, artificial
  Oligomer
cuggucucuguugauccag

SEQ ID NO: 5952 - RNA, 19 nt, artificial
  Oligomer
ugucuuggacaccuucgau

SEQ ID NO: 5953 - RNA, 19 nt, artificial
  Oligomer
gcagaugucauguacauau

SEQ ID NO: 5954 - RNA, 19 nt, artificial
  Oligomer
aaguucacagugugagcca

SEQ ID NO: 5955 - RNA, 19 nt, artificial
  Oligomer
gcaacuagaaggacuaagg

SEQ ID NO: 5956 - RNA, 19 nt, artificial
  Oligomer
cgugauggagucuuucuuc

SEQ ID NO: 5957 - RNA, 19 nt, artificial
  Oligomer
caaauagggcaaagaaucg

SEQ ID NO: 5958 - RNA, 19 nt, artificial
  Oligomer
cacacaucgaugucauaca

SEQ ID NO: 5959 - RNA, 19 nt, artificial
  Oligomer
aagaccgcuggucucuguu

SEQ ID NO: 5960 - RNA, 19 nt, artificial
  Oligomer
cagucgaaguugaggcacu

SEQ ID NO: 5961 - RNA, 19 nt, artificial
  Oligomer
cauugucacacuccucgac

SEQ ID NO: 5962 - RNA, 19 nt, artificial
  Oligomer
uguagcacuugauguuaca

SEQ ID NO: 5963 - RNA, 19 nt, artificial
  Oligomer
ucugcagaauggaagcaaa

SEQ ID NO: 5964 - RNA, 19 nt, artificial
  Oligomer
aggugaguccaauagaaca

SEQ ID NO: 5965 - RNA, 19 nt, artificial
  Oligomer
uggagcagaugaacaugag

SEQ ID NO: 5966 - RNA, 19 nt, artificial
  Oligomer
ugcagaugucauguacaua

SEQ ID NO: 5967 - RNA, 19 nt, artificial
  Oligomer
cuggagcagaugaacauga

SEQ ID NO: 5968 - RNA, 19 nt, artificial
  Oligomer
uggagaggugaggcuagaa

SEQ ID NO: 5969 - RNA, 19 nt, artificial
  Oligomer
cccaucuucuccugcaaug

SEQ ID NO: 5970 - RNA, 19 nt, artificial
  Oligomer
gaguccaauagaacaccuc

SEQ ID NO: 5971 - RNA, 19 nt, artificial
  Oligomer
aggcucacaaaccacucga

SEQ ID NO: 5972 - RNA, 19 nt, artificial
  Oligomer
ugaagucagugagaccaag

SEQ ID NO: 5973 - RNA, 19 nt, artificial
  Oligomer
uggucuuaaacugcugagu

SEQ ID NO: 5974 - RNA, 19 nt, artificial
  Oligomer
cuucuccaggaaaaacaag

SEQ ID NO: 5975 - RNA, 19 nt, artificial
  Oligomer
gauagugucuuucugcuca

SEQ ID NO: 5976 - RNA, 19 nt, artificial
  Oligomer
aaguugggcccaugaaaga

SEQ ID NO: 5977 - RNA, 19 nt, artificial
  Oligomer
gagaugagugaccuuggag

SEQ ID NO: 5978 - RNA, 19 nt, artificial
  Oligomer
guuuagucagcaggcucac

SEQ ID NO: 5979 - RNA, 19 nt, artificial
  Oligomer
gaacuggauguucuggucc

SEQ ID NO: 5980 - RNA, 19 nt, artificial
  Oligomer
aacuggagcagaugaacau

SEQ ID NO: 5981 - RNA, 19 nt, artificial
  Oligomer
aagaggaauuugaguuugu

SEQ ID NO: 5982 - RNA, 19 nt, artificial
  Oligomer
cacagaagaagaccugcac

SEQ ID NO: 5983 - RNA, 19 nt, artificial
  Oligomer
ucucuuggaaaaaucugaa

SEQ ID NO: 5984 - RNA, 19 nt, artificial
  Oligomer
ugauggucagguucuccau

SEQ ID NO: 5985 - RNA, 19 nt, artificial
  Oligomer
ucuccaggaaaaacaagau

SEQ ID NO: 5986 - RNA, 19 nt, artificial
  Oligomer
ccagauaaaguccaccuua

SEQ ID NO: 5987 - RNA, 19 nt, artificial
  Oligomer
uagaaggacuaagggcuuc

SEQ ID NO: 5988 - RNA, 19 nt, artificial
  Oligomer
aggacucuuucacaugcag

SEQ ID NO: 5989 - RNA, 19 nt, artificial
  Oligomer
cauaugcagcuccaggaag

SEQ ID NO: 5990 - RNA, 19 nt, artificial
  Oligomer
ccauaaggcccaucgaugu

SEQ ID NO: 5991 - RNA, 19 nt, artificial
  Oligomer
ggucuuaaacugcugaguc

SEQ ID NO: 5992 - RNA, 19 nt, artificial
  Oligomer
aaagaccgcuggucucugu

SEQ ID NO: 5993 - RNA, 19 nt, artificial
  Oligomer
cucuuucacaugcagagcu

SEQ ID NO: 5994 - RNA, 19 nt, artificial
  Oligomer
agaagaagaccugcaccuu

SEQ ID NO: 5995 - RNA, 19 nt, artificial
  Oligomer
agugcagaugucauguaca

SEQ ID NO: 5996 - RNA, 19 nt, artificial
  Oligomer
guccaccuuauggagcuuc

SEQ ID NO: 5997 - RNA, 19 nt, artificial
  Oligomer
ccuguacaugauacucugc

SEQ ID NO: 5998 - RNA, 19 nt, artificial
  Oligomer
acccaccaauuccagauac

SEQ ID NO: 5999 - RNA, 19 nt, artificial
  Oligomer
gugaguccaauagaacacc

SEQ ID NO: 6000 - RNA, 19 nt, artificial
  Oligomer
ccugcaauggucuuaaacu

SEQ ID NO: 6001 - RNA, 19 nt, artificial
  Oligomer
gcaaguaugcuuucuuuuc

SEQ ID NO: 6002 - RNA, 19 nt, artificial
  Oligomer
gacgaccuuugacucuuuc

SEQ ID NO: 6003 - RNA, 19 nt, artificial
  Oligomer
gaaggacucauacagccug

SEQ ID NO: 6004 - RNA, 19 nt, artificial
  Oligomer
guccaauagaacaccucaa

SEQ ID NO: 6005 - RNA, 19 nt, artificial
  Oligomer
aguugggcccaugaaagau

SEQ ID NO: 6006 - RNA, 19 nt, artificial
  Oligomer
acuccaguuuacuaauaca

SEQ ID NO: 6007 - RNA, 19 nt, artificial
  Oligomer
gccucauauuaauuaucac

SEQ ID NO: 6008 - RNA, 19 nt, artificial
  Oligomer
gguuuaggaggaaaaggaa

SEQ ID NO: 6009 - RNA, 19 nt, artificial
  Oligomer
gagagugagagaaaauaaa

SEQ ID NO: 6010 - RNA, 19 nt, artificial
  Oligomer
ggaucaaaagguucaguaa

SEQ ID NO: 6011 - RNA, 19 nt, artificial
  Oligomer
cgcugugccucauauuaau

SEQ ID NO: 6012 - RNA, 19 nt, artificial
  Oligomer
gagugcuugucauuauaaa

SEQ ID NO: 6013 - RNA, 19 nt, artificial
  Oligomer
ggagagugagagaaaauaa

SEQ ID NO: 6014 - RNA, 19 nt, artificial
  Oligomer
gggacuaggaugaacuaaa

SEQ ID NO: 6015 - RNA, 19 nt, artificial
  Oligomer
ucaucaucaucauccuaaa

SEQ ID NO: 6016 - RNA, 19 nt, artificial
  Oligomer
ggagacaggcaaaaugaaa

SEQ ID NO: 6017 - RNA, 19 nt, artificial
  Oligomer
cgguaaugaggaagaagga

SEQ ID NO: 6018 - RNA, 19 nt, artificial
  Oligomer
ggcugugcauaauauaaca

SEQ ID NO: 6019 - RNA, 19 nt, artificial
  Oligomer
cugggauaaugaauucaag

SEQ ID NO: 6020 - RNA, 19 nt, artificial
  Oligomer
cgaauauagccuuucugaa

SEQ ID NO: 6021 - RNA, 19 nt, artificial
  Oligomer
gacuaauuuccugcccaaa

SEQ ID NO: 6022 - RNA, 19 nt, artificial
  Oligomer
ggauaaugaauucaagaca

SEQ ID NO: 6023 - RNA, 19 nt, artificial
  Oligomer
gccagaugcaggaaaggaa

SEQ ID NO: 6024 - RNA, 19 nt, artificial
  Oligomer
ccggguuuaugauauucca

SEQ ID NO: 6025 - RNA, 19 nt, artificial
  Oligomer
caggcaaaaugaaaguuau

SEQ ID NO: 6026 - RNA, 19 nt, artificial
  Oligomer
ggaugagucucaggccaau

SEQ ID NO: 6027 - RNA, 19 nt, artificial
  Oligomer
gcgguuuuggcgaucucaa

SEQ ID NO: 6028 - RNA, 19 nt, artificial
  Oligomer
caagguuuucuaucuucaa

SEQ ID NO: 6029 - RNA, 19 nt, artificial
  Oligomer
gagugcauuucauuuucaa

SEQ ID NO: 6030 - RNA, 19 nt, artificial
  Oligomer
accacacaaugccaagaua

SEQ ID NO: 6031 - RNA, 19 nt, artificial
  Oligomer
ggaaguuagggaaaagauu

SEQ ID NO: 6032 - RNA, 19 nt, artificial
  Oligomer
agacuaauuuccugcccaa

SEQ ID NO: 6033 - RNA, 19 nt, artificial
  Oligomer
ggcuaaggauacuaaccaa

SEQ ID NO: 6034 - RNA, 19 nt, artificial
  Oligomer
uggagacaggcaaaaugaa

SEQ ID NO: 6035 - RNA, 19 nt, artificial
  Oligomer
ugggauaaugaauucaaga

SEQ ID NO: 6036 - RNA, 19 nt, artificial
  Oligomer
cagccugccugaauuucaa

SEQ ID NO: 6037 - RNA, 19 nt, artificial
  Oligomer
caauucaucuauucaacag

SEQ ID NO: 6038 - RNA, 19 nt, artificial
  Oligomer
agaagguggucaucaccaa

SEQ ID NO: 6039 - RNA, 19 nt, artificial
  Oligomer
gaauauagccuuucugaaa

SEQ ID NO: 6040 - RNA, 19 nt, artificial
  Oligomer
gccucagaauccucaaaau

SEQ ID NO: 6041 - RNA, 19 nt, artificial
  Oligomer
gacugguuuaggaggaaaa

SEQ ID NO: 6042 - RNA, 19 nt, artificial
  Oligomer
acugggauaaugaauucaa

SEQ ID NO: 6043 - RNA, 19 nt, artificial
  Oligomer
caguggaaguuagggaaaa

SEQ ID NO: 6044 - RNA, 19 nt, artificial
  Oligomer
ccuucgcauccauucucaa

SEQ ID NO: 6045 - RNA, 19 nt, artificial
  Oligomer
ggguuuucuuuuuguucuu

SEQ ID NO: 6046 - RNA, 19 nt, artificial
  Oligomer
guuggagguggagaauuaa

SEQ ID NO: 6047 - RNA, 19 nt, artificial
  Oligomer
gggagagugagagaaaaua

SEQ ID NO: 6048 - RNA, 19 nt, artificial
  Oligomer
ccaguuuacuaauacagca

SEQ ID NO: 6049 - RNA, 19 nt, artificial
  Oligomer
gaaucaaaagggaaaggau

SEQ ID NO: 6050 - RNA, 19 nt, artificial
  Oligomer
cugugugacuaaugguuua

SEQ ID NO: 6051 - RNA, 19 nt, artificial
  Oligomer
caacaaggaaaacuucuaa

SEQ ID NO: 6052 - RNA, 19 nt, artificial
  Oligomer
ugaggguaggucugacaaa

SEQ ID NO: 6053 - RNA, 19 nt, artificial
  Oligomer
ggagaaagaugugaucaca

SEQ ID NO: 6054 - RNA, 19 nt, artificial
  Oligomer
cauggaugauugcacuuca

SEQ ID NO: 6055 - RNA, 19 nt, artificial
  Oligomer
guuucaagaugcguggaaa

SEQ ID NO: 6056 - RNA, 19 nt, artificial
  Oligomer
ccaugaugaggagaaagau

SEQ ID NO: 6057 - RNA, 19 nt, artificial
  Oligomer
gagagugucucaacacuua

SEQ ID NO: 6058 - RNA, 19 nt, artificial
  Oligomer
cguaaauacacacacaaaa

SEQ ID NO: 6059 - RNA, 19 nt, artificial
  Oligomer
aaaagaagaaggaaaccaa

SEQ ID NO: 6060 - RNA, 19 nt, artificial
  Oligomer
ccugcuuaaaaauggacaa

SEQ ID NO: 6061 - RNA, 19 nt, artificial
  Oligomer
gcugccucagaauccucaa

SEQ ID NO: 6062 - RNA, 19 nt, artificial
  Oligomer
gcauacuccaguuuacuaa

SEQ ID NO: 6063 - RNA, 19 nt, artificial
  Oligomer
ccguaaauacacacacaaa

SEQ ID NO: 6064 - RNA, 19 nt, artificial
  Oligomer
ccaucgagcuacagaugaa

SEQ ID NO: 6065 - RNA, 19 nt, artificial
  Oligomer
ccagaucauuaggacauaa

SEQ ID NO: 6066 - RNA, 19 nt, artificial
  Oligomer
ccaccuaaguucuuuuaca

SEQ ID NO: 6067 - RNA, 19 nt, artificial
  Oligomer
cccauuucugggaacuaaa

SEQ ID NO: 6068 - RNA, 19 nt, artificial
  Oligomer
ggagguauacacauacuga

SEQ ID NO: 6069 - RNA, 19 nt, artificial
  Oligomer
ccagcuagcccuuaugaau

SEQ ID NO: 6070 - RNA, 19 nt, artificial
  Oligomer
ccgagucaauaauucugau

SEQ ID NO: 6071 - RNA, 19 nt, artificial
  Oligomer
agaucaaauucacacucaa

SEQ ID NO: 6072 - RNA, 19 nt, artificial
  Oligomer
gggaaaggaucaaaagguu

SEQ ID NO: 6073 - RNA, 19 nt, artificial
  Oligomer
agaguuuggcugugcauaa

SEQ ID NO: 6074 - RNA, 19 nt, artificial
  Oligomer
gccugaauuucaacugcau

SEQ ID NO: 6075 - RNA, 19 nt, artificial
  Oligomer
guuuaggaggaaaaggaaa

SEQ ID NO: 6076 - RNA, 19 nt, artificial
  Oligomer
gguuuugagagcacuuuua

SEQ ID NO: 6077 - RNA, 19 nt, artificial
  Oligomer
agugcgugcugcucaacaa

SEQ ID NO: 6078 - RNA, 19 nt, artificial
  Oligomer
uaaugaggaagaaggagaa

SEQ ID NO: 6079 - RNA, 19 nt, artificial
  Oligomer
gguugaacgucuuccucuu

SEQ ID NO: 6080 - RNA, 19 nt, artificial
  Oligomer
cacacaaugccaagauaga

SEQ ID NO: 6081 - RNA, 19 nt, artificial
  Oligomer
gaggaagacuucuuuagua

SEQ ID NO: 6082 - RNA, 19 nt, artificial
  Oligomer
agcccuuaugaauauugaa

SEQ ID NO: 6083 - RNA, 19 nt, artificial
  Oligomer
ccauuucugggaacuaaaa

SEQ ID NO: 6084 - RNA, 19 nt, artificial
  Oligomer
cguggaaacuaccuaagau

SEQ ID NO: 6085 - RNA, 19 nt, artificial
  Oligomer
ccuaaguucuuuuacacaa

SEQ ID NO: 6086 - RNA, 19 nt, artificial
  Oligomer
ggcccaacugggauaauga

SEQ ID NO: 6087 - RNA, 19 nt, artificial
  Oligomer
augggagagugagagaaaa

SEQ ID NO: 6088 - RNA, 19 nt, artificial
  Oligomer
gugugaaugcccgagucaa

SEQ ID NO: 6089 - RNA, 19 nt, artificial
  Oligomer
gguauuaccggguuuauga

SEQ ID NO: 6090 - RNA, 19 nt, artificial
  Oligomer
ugaggaagaaggagaaaga

SEQ ID NO: 6091 - RNA, 19 nt, artificial
  Oligomer
cuuuggcacugccagugaa

SEQ ID NO: 6092 - RNA, 19 nt, artificial
  Oligomer
ggaacuaaaaccaguuuua

SEQ ID NO: 6093 - RNA, 19 nt, artificial
  Oligomer
aagucagucugguacaaau

SEQ ID NO: 6094 - RNA, 19 nt, artificial
  Oligomer
guuugauacucuuuccaca

SEQ ID NO: 6095 - RNA, 19 nt, artificial
  Oligomer
agauguucuuucuacagaa

SEQ ID NO: 6096 - RNA, 19 nt, artificial
  Oligomer
ggcugaaacccugaguaaa

SEQ ID NO: 6097 - RNA, 19 nt, artificial
  Oligomer
ccugaagccuuggcugaaa

SEQ ID NO: 6098 - RNA, 19 nt, artificial
  Oligomer
aaaagggaaaggaucaaaa

SEQ ID NO: 6099 - RNA, 19 nt, artificial
  Oligomer
ugauaagcaggaguuucaa

SEQ ID NO: 6100 - RNA, 19 nt, artificial
  Oligomer
cagagaguuuggcugugca

SEQ ID NO: 6101 - RNA, 19 nt, artificial
  Oligomer
cuucgguaaugaggaagaa

SEQ ID NO: 6102 - RNA, 19 nt, artificial
  Oligomer
cugucauagaccaaaggaa

SEQ ID NO: 6103 - RNA, 19 nt, artificial
  Oligomer
cccuuaaaggaaugucaaa

SEQ ID NO: 6104 - RNA, 19 nt, artificial
  Oligomer
ccugaaggguucugcacau

SEQ ID NO: 6105 - RNA, 19 nt, artificial
  Oligomer
acuuaggaauugugacaaa

SEQ ID NO: 6106 - RNA, 19 nt, artificial
  Oligomer
uguggguugugcugccaaa

SEQ ID NO: 6107 - RNA, 19 nt, artificial
  Oligomer
ggaaaaggaaauaaggaga

SEQ ID NO: 6108 - RNA, 19 nt, artificial
  Oligomer
ccaagagcaggguuuucuu

SEQ ID NO: 6109 - RNA, 19 nt, artificial
  Oligomer
uaacaacccagaaacaaaa

SEQ ID NO: 6110 - RNA, 19 nt, artificial
  Oligomer
agagaaugggagagugaga

SEQ ID NO: 6111 - RNA, 19 nt, artificial
  Oligomer
cuaauuuccugcccaaagu

SEQ ID NO: 6112 - RNA, 19 nt, artificial
  Oligomer
ggucacucacccuuucaaa

SEQ ID NO: 6113 - RNA, 19 nt, artificial
  Oligomer
ugaacuuggagacaggcaa

SEQ ID NO: 6114 - RNA, 19 nt, artificial
  Oligomer
ccuaugacuuggaaaugga

SEQ ID NO: 6115 - RNA, 19 nt, artificial
  Oligomer
aggaaauuuuccagaucau

SEQ ID NO: 6116 - RNA, 19 nt, artificial
  Oligomer
gaggaaaaggaaauaagga

SEQ ID NO: 6117 - RNA, 19 nt, artificial
  Oligomer
gaggguaccucaguuauaa

SEQ ID NO: 6118 - RNA, 19 nt, artificial
  Oligomer
gaaugaauuuagaaccaca

SEQ ID NO: 6119 - RNA, 19 nt, artificial
  Oligomer
gagccacaaauguuuagaa

SEQ ID NO: 6120 - RNA, 19 nt, artificial
  Oligomer
uguucuuucuacagaagaa

SEQ ID NO: 6121 - RNA, 19 nt, artificial
  Oligomer
gcccaacugggauaaugaa

SEQ ID NO: 6122 - RNA, 19 nt, artificial
  Oligomer
ccaaucugaagcucaaaaa

SEQ ID NO: 6123 - RNA, 19 nt, artificial
  Oligomer
ccaagguuuucuaucuuca

SEQ ID NO: 6124 - RNA, 19 nt, artificial
  Oligomer
gcuccuugugcuauaaaau

SEQ ID NO: 6125 - RNA, 19 nt, artificial
  Oligomer
cugugcucaacuauuaaaa

SEQ ID NO: 6126 - RNA, 19 nt, artificial
  Oligomer
ccauugcacaucuauuuaa

SEQ ID NO: 6127 - RNA, 19 nt, artificial
  Oligomer
caauuuugcucgaaagaga

SEQ ID NO: 6128 - RNA, 19 nt, artificial
  Oligomer
aaugggagagugagagaaa

SEQ ID NO: 6129 - RNA, 19 nt, artificial
  Oligomer
acauuuauguggagcucua

SEQ ID NO: 6130 - RNA, 19 nt, artificial
  Oligomer
ccugaggaagacuucuuua

SEQ ID NO: 6131 - RNA, 19 nt, artificial
  Oligomer
cugccaaaugcucaaauaa

SEQ ID NO: 6132 - RNA, 19 nt, artificial
  Oligomer
gcguggaaacuaccuaaga

SEQ ID NO: 6133 - RNA, 19 nt, artificial
  Oligomer
ggcucuguuuauuguuuca

SEQ ID NO: 6134 - RNA, 19 nt, artificial
  Oligomer
caucaucaucauccuaaaa

SEQ ID NO: 6135 - RNA, 19 nt, artificial
  Oligomer
cuaugacuuggaaauggau

SEQ ID NO: 6136 - RNA, 19 nt, artificial
  Oligomer
aacugugcucaacuauuaa

SEQ ID NO: 6137 - RNA, 19 nt, artificial
  Oligomer
uuaacaacccagaaacaaa

SEQ ID NO: 6138 - RNA, 19 nt, artificial
  Oligomer
uggauugauuggaguuaau

SEQ ID NO: 6139 - RNA, 19 nt, artificial
  Oligomer
aucacuuccuccaccaaaa

SEQ ID NO: 6140 - RNA, 19 nt, artificial
  Oligomer
gguggugauguuaguggga

SEQ ID NO: 6141 - RNA, 19 nt, artificial
  Oligomer
ugugaaugcccgagucaau

SEQ ID NO: 6142 - RNA, 19 nt, artificial
  Oligomer
gucacucacccuuucaaaa

SEQ ID NO: 6143 - RNA, 19 nt, artificial
  Oligomer
ugugcauaauuaaaaccag

SEQ ID NO: 6144 - RNA, 19 nt, artificial
  Oligomer
ggaggaaaaggaaauaagg

SEQ ID NO: 6145 - RNA, 19 nt, artificial
  Oligomer
aaagauucuuggacucaau

SEQ ID NO: 6146 - RNA, 19 nt, artificial
  Oligomer
ggcuuuguaugugaauaau

SEQ ID NO: 6147 - RNA, 19 nt, artificial
  Oligomer
gaaacccugaguaaacaaa

SEQ ID NO: 6148 - RNA, 19 nt, artificial
  Oligomer
aaaagauucuuggacucaa

SEQ ID NO: 6149 - RNA, 19 nt, artificial
  Oligomer
ucaagagagagucucuaaa

SEQ ID NO: 6150 - RNA, 19 nt, artificial
  Oligomer
aaggcaaaagggagagaga

SEQ ID NO: 6151 - RNA, 19 nt, artificial
  Oligomer
cucuaagaaugaugaagca

SEQ ID NO: 6152 - RNA, 19 nt, artificial
  Oligomer
ugaaggaaauuuuccagau

SEQ ID NO: 6153 - RNA, 19 nt, artificial
  Oligomer
gucaguggaaguuagggaa

SEQ ID NO: 6154 - RNA, 19 nt, artificial
  Oligomer
gaaaaggaaauaaggagaa

SEQ ID NO: 6155 - RNA, 19 nt, artificial
  Oligomer
caaaagggaaaggaucaaa

SEQ ID NO: 6156 - RNA, 19 nt, artificial
  Oligomer
caaggaguagcuauauauu

SEQ ID NO: 6157 - RNA, 19 nt, artificial
  Oligomer
gaaccacacaaugccaaga

SEQ ID NO: 6158 - RNA, 19 nt, artificial
  Oligomer
gcaucacuggaguugucau

SEQ ID NO: 6159 - RNA, 19 nt, artificial
  Oligomer
gaaugggagagugagagaa

SEQ ID NO: 6160 - RNA, 19 nt, artificial
  Oligomer
cgaagacaacuggacagga

SEQ ID NO: 6161 - RNA, 19 nt, artificial
  Oligomer
guaaugguuuucccuuaaa

SEQ ID NO: 6162 - RNA, 19 nt, artificial
  Oligomer
cucaguaaugucaguggaa

SEQ ID NO: 6163 - RNA, 19 nt, artificial
  Oligomer
gaaugaugaagcauuguuu

SEQ ID NO: 6164 - RNA, 19 nt, artificial
  Oligomer
cauacuccaguuuacuaau

SEQ ID NO: 6165 - RNA, 19 nt, artificial
  Oligomer
aggguaggucugacaaaua

SEQ ID NO: 6166 - RNA, 19 nt, artificial
  Oligomer
cauccauucucaagucagu

SEQ ID NO: 6167 - RNA, 19 nt, artificial
  Oligomer
gguuuuggcgaucucaaca

SEQ ID NO: 6168 - RNA, 19 nt, artificial
  Oligomer
ucaacacccuaauaccaga

SEQ ID NO: 6169 - RNA, 19 nt, artificial
  Oligomer
gaauucaagacaauugcaa

SEQ ID NO: 6170 - RNA, 19 nt, artificial
  Oligomer
ggccugcugugcgaauaua

SEQ ID NO: 6171 - RNA, 19 nt, artificial
  Oligomer
ccagaucuagcccaucuua

SEQ ID NO: 6172 - RNA, 19 nt, artificial
  Oligomer
guaaacaaagcaucuccaa

SEQ ID NO: 6173 - RNA, 19 nt, artificial
  Oligomer
cccuuauuuuccguaaaua

SEQ ID NO: 6174 - RNA, 19 nt, artificial
  Oligomer
guaugaacuggagagggua

SEQ ID NO: 6175 - RNA, 19 nt, artificial
  Oligomer
cgguuuuggcgaucucaac

SEQ ID NO: 6176 - RNA, 19 nt, artificial
  Oligomer
ccugcuccuugugcuauaa

SEQ ID NO: 6177 - RNA, 19 nt, artificial
  Oligomer
cugugccucauauuaauua

SEQ ID NO: 6178 - RNA, 19 nt, artificial
  Oligomer
gguacucuaagaaugauga

SEQ ID NO: 6179 - RNA, 19 nt, artificial
  Oligomer
gguucugcacauucuuauu

SEQ ID NO: 6180 - RNA, 19 nt, artificial
  Oligomer
aggaaauaaggagaaaaga

SEQ ID NO: 6181 - RNA, 19 nt, artificial
  Oligomer
acacaaugccaagauagaa

SEQ ID NO: 6182 - RNA, 19 nt, artificial
  Oligomer
aagggacuaggaugaacua

SEQ ID NO: 6183 - RNA, 19 nt, artificial
  Oligomer
agcuacagaugaagaagaa

SEQ ID NO: 6184 - RNA, 19 nt, artificial
  Oligomer
gcaggcuuuguaugugaau

SEQ ID NO: 6185 - RNA, 19 nt, artificial
  Oligomer
ggguucugcacauucuuau

SEQ ID NO: 6186 - RNA, 19 nt, artificial
  Oligomer
ggauacuaaccaauaggau

SEQ ID NO: 6187 - RNA, 19 nt, artificial
  Oligomer
aggacauaauacauguuga

SEQ ID NO: 6188 - RNA, 19 nt, artificial
  Oligomer
guacucuaagaaugaugaa

SEQ ID NO: 6189 - RNA, 19 nt, artificial
  Oligomer
cauuggccuugccauccau

SEQ ID NO: 6190 - RNA, 19 nt, artificial
  Oligomer
cggaggucuuacuuugaag

SEQ ID NO: 6191 - RNA, 19 nt, artificial
  Oligomer
ggagaggguaccucaguua

SEQ ID NO: 6192 - RNA, 19 nt, artificial
  Oligomer
ggagcucuaugguuuugag

SEQ ID NO: 6193 - RNA, 19 nt, artificial
  Oligomer
cuucccuaagauuaugaaa

SEQ ID NO: 6194 - RNA, 19 nt, artificial
  Oligomer
ggaccugggagauaauucu

SEQ ID NO: 6195 - RNA, 19 nt, artificial
  Oligomer
agggcagaagacugguuua

SEQ ID NO: 6196 - RNA, 19 nt, artificial
  Oligomer
gccagauguucuuucuaca

SEQ ID NO: 6197 - RNA, 19 nt, artificial
  Oligomer
ggcucuccauuuuugucau

SEQ ID NO: 6198 - RNA, 19 nt, artificial
  Oligomer
caaugcuuguggcugugau

SEQ ID NO: 6199 - RNA, 19 nt, artificial
  Oligomer
gacuaggaugaacuaaaua

SEQ ID NO: 6200 - RNA, 19 nt, artificial
  Oligomer
cuaaaauuaacaacccaga

SEQ ID NO: 6201 - RNA, 19 nt, artificial
  Oligomer
gagagcggauacucaagua

SEQ ID NO: 6202 - RNA, 19 nt, artificial
  Oligomer
ccuuugagugguuugcaga

SEQ ID NO: 6203 - RNA, 19 nt, artificial
  Oligomer
cuaugagguggugauguua

SEQ ID NO: 6204 - RNA, 19 nt, artificial
  Oligomer
aggcuuuguaugugaauaa

SEQ ID NO: 6205 - RNA, 19 nt, artificial
  Oligomer
aucacaggccugaaacaaa

SEQ ID NO: 6206 - RNA, 19 nt, artificial
  Oligomer
aauuuugcucgaaagagaa

SEQ ID NO: 6207 - RNA, 19 nt, artificial
  Oligomer
ggaaauuuuccagaucauu

SEQ ID NO: 6208 - RNA, 19 nt, artificial
  Oligomer
gagaaaagagaaugggaga

SEQ ID NO: 6209 - RNA, 19 nt, artificial
  Oligomer
ggagugcauuucauuuuca

SEQ ID NO: 6210 - RNA, 19 nt, artificial
  Oligomer
ugaucacaggccugaaaca

SEQ ID NO: 6211 - RNA, 19 nt, artificial
  Oligomer
ugugaucacaggccugaaa

SEQ ID NO: 6212 - RNA, 19 nt, artificial
  Oligomer
ccaacuaaguuaugaaagu

SEQ ID NO: 6213 - RNA, 19 nt, artificial
  Oligomer
cacgcugugccucauauua

SEQ ID NO: 6214 - RNA, 19 nt, artificial
  Oligomer
aacaagaguucgaagacaa

SEQ ID NO: 6215 - RNA, 19 nt, artificial
  Oligomer
ugugcugccaaaugcucaa

SEQ ID NO: 6216 - RNA, 19 nt, artificial
  Oligomer
ucaagaacaggcuaaggau

SEQ ID NO: 6217 - RNA, 19 nt, artificial
  Oligomer
gagguauacacauacugau

SEQ ID NO: 6218 - RNA, 19 nt, artificial
  Oligomer
guuuggcugugcauaauau

SEQ ID NO: 6219 - RNA, 19 nt, artificial
  Oligomer
gguaggucugacaaauaag

SEQ ID NO: 6220 - RNA, 19 nt, artificial
  Oligomer
acgcugugccucauauuaa

SEQ ID NO: 6221 - RNA, 19 nt, artificial
  Oligomer
guucgaagacaacuggaca

SEQ ID NO: 6222 - RNA, 19 nt, artificial
  Oligomer
cauuuuuuuccucucagua

SEQ ID NO: 6223 - RNA, 19 nt, artificial
  Oligomer
ggaugaacuaaauaagaac

SEQ ID NO: 6224 - RNA, 19 nt, artificial
  Oligomer
guucaaaauggaaguggga

SEQ ID NO: 6225 - RNA, 19 nt, artificial
  Oligomer
gugaaugcccgagucaaua

SEQ ID NO: 6226 - RNA, 19 nt, artificial
  Oligomer
guguuauccaguuaugaga

SEQ ID NO: 6227 - RNA, 19 nt, artificial
  Oligomer
guaacuucccuaagauuau

SEQ ID NO: 6228 - RNA, 19 nt, artificial
  Oligomer
ccacacaaugccaagauag

SEQ ID NO: 6229 - RNA, 19 nt, artificial
  Oligomer
ugcaggcuuuguaugugaa

SEQ ID NO: 6230 - RNA, 19 nt, artificial
  Oligomer
cuuccaugaggaaauaaau

SEQ ID NO: 6231 - RNA, 19 nt, artificial
  Oligomer
gcacccuuuuacacugaca

SEQ ID NO: 6232 - RNA, 19 nt, artificial
  Oligomer
ggagcugaacgaauuguac

SEQ ID NO: 6233 - RNA, 19 nt, artificial
  Oligomer
gagaguuuggcugugcaua

SEQ ID NO: 6234 - RNA, 19 nt, artificial
  Oligomer
aaaauaaaggaaugcccaa

SEQ ID NO: 6235 - RNA, 19 nt, artificial
  Oligomer
ugcaauuguguuugugaaa

SEQ ID NO: 6236 - RNA, 19 nt, artificial
  Oligomer
aguuauaaggagucugaga

SEQ ID NO: 6237 - RNA, 19 nt, artificial
  Oligomer
aaggaaauuuuccagauca

SEQ ID NO: 6238 - RNA, 19 nt, artificial
  Oligomer
gaauauaauugaaggaggu

SEQ ID NO: 6239 - RNA, 19 nt, artificial
  Oligomer
caggcuuuguaugugaaua

SEQ ID NO: 6240 - RNA, 19 nt, artificial
  Oligomer
uucuaaccuaugugcauaa

SEQ ID NO: 6241 - RNA, 19 nt, artificial
  Oligomer
guggaaacuaccuaagaua

SEQ ID NO: 6242 - RNA, 19 nt, artificial
  Oligomer
ugcuccuugugcuauaaaa

SEQ ID NO: 6243 - RNA, 19 nt, artificial
  Oligomer
ccuuggagccacaaauguu

SEQ ID NO: 6244 - RNA, 19 nt, artificial
  Oligomer
cucgaaagagaauaaagaa

SEQ ID NO: 6245 - RNA, 19 nt, artificial
  Oligomer
cccugaggaagacuucuuu

SEQ ID NO: 6246 - RNA, 19 nt, artificial
  Oligomer
gggaaaagauucuuggacu

SEQ ID NO: 6247 - RNA, 19 nt, artificial
  Oligomer
caaaauggaagugggacaa

SEQ ID NO: 6248 - RNA, 19 nt, artificial
  Oligomer
cgaauuguacgugggcaga

SEQ ID NO: 6249 - RNA, 19 nt, artificial
  Oligomer
uugcaauuguguuugugaa

SEQ ID NO: 6250 - RNA, 19 nt, artificial
  Oligomer
ugccauccauggagcugaa

SEQ ID NO: 6251 - RNA, 19 nt, artificial
  Oligomer
uagaaccacacaaugccaa

SEQ ID NO: 6252 - RNA, 19 nt, artificial
  Oligomer
uugagagcacuuuuacaaa

SEQ ID NO: 6253 - RNA, 19 nt, artificial
  Oligomer
cuccgagaguguuucucca

SEQ ID NO: 6254 - RNA, 19 nt, artificial
  Oligomer
caaagguguccaagcugga

SEQ ID NO: 6255 - RNA, 19 nt, artificial
  Oligomer
ugaauuuagaaccacacaa

SEQ ID NO: 6256 - RNA, 19 nt, artificial
  Oligomer
agucagucugguacaaaua

SEQ ID NO: 6257 - RNA, 19 nt, artificial
  Oligomer
uguggaauggugugugaau

SEQ ID NO: 6258 - RNA, 19 nt, artificial
  Oligomer
caaugccaagauagaauua

SEQ ID NO: 6259 - RNA, 19 nt, artificial
  Oligomer
acagguacucuaagaauga

SEQ ID NO: 6260 - RNA, 19 nt, artificial
  Oligomer
agaauauuggcccuuucua

SEQ ID NO: 6261 - RNA, 19 nt, artificial
  Oligomer
gugucauuuuugccaucau

SEQ ID NO: 6262 - RNA, 19 nt, artificial
  Oligomer
ccagaugcaggaaaggaac

SEQ ID NO: 6263 - RNA, 19 nt, artificial
  Oligomer
caguaaugucaguggaagu

SEQ ID NO: 6264 - RNA, 19 nt, artificial
  Oligomer
ggaguggcacccuuuuaca

SEQ ID NO: 6265 - RNA, 19 nt, artificial
  Oligomer
ucgagcuacagaugaagaa

SEQ ID NO: 6266 - RNA, 19 nt, artificial
  Oligomer
agacugguuuaggaggaaa

SEQ ID NO: 6267 - RNA, 19 nt, artificial
  Oligomer
uacuaauacagcaggguaa

SEQ ID NO: 6268 - RNA, 19 nt, artificial
  Oligomer
cugccucagaauccucaaa

SEQ ID NO: 6269 - RNA, 19 nt, artificial
  Oligomer
agcacucucugaacuugga

SEQ ID NO: 6270 - RNA, 19 nt, artificial
  Oligomer
agaaccacacaaugccaag

SEQ ID NO: 6271 - RNA, 19 nt, artificial
  Oligomer
caagagagagucucuaaau

SEQ ID NO: 6272 - RNA, 19 nt, artificial
  Oligomer
gcaggguuuucuuuuuguu

SEQ ID NO: 6273 - RNA, 19 nt, artificial
  Oligomer
gaaugcccgagucaauaau

SEQ ID NO: 6274 - RNA, 19 nt, artificial
  Oligomer
aaugcuuguggcugugaua

SEQ ID NO: 6275 - RNA, 19 nt, artificial
  Oligomer
cuuggacucaauuuuagaa

SEQ ID NO: 6276 - RNA, 19 nt, artificial
  Oligomer
gaguucgaagacaacugga

SEQ ID NO: 6277 - RNA, 19 nt, artificial
  Oligomer
guuucuccaagguuuucua

SEQ ID NO: 6278 - RNA, 19 nt, artificial
  Oligomer
ccagaaacaaaaaucucua

SEQ ID NO: 6279 - RNA, 19 nt, artificial
  Oligomer
aagacaacuggacaggaau

SEQ ID NO: 6280 - RNA, 19 nt, artificial
  Oligomer
gguuuucccuuaaaggaau

SEQ ID NO: 6281 - RNA, 19 nt, artificial
  Oligomer
ggucuuacuuugaagucuu

SEQ ID NO: 6282 - RNA, 19 nt, artificial
  Oligomer
acugcaugcugauucucuu

SEQ ID NO: 6283 - RNA, 19 nt, artificial
  Oligomer
aaagaggguuggaggugga

SEQ ID NO: 6284 - RNA, 19 nt, artificial
  Oligomer
gauucacaccauugcacau

SEQ ID NO: 6285 - RNA, 19 nt, artificial
  Oligomer
cuuccuccaccaaaaccau

SEQ ID NO: 6286 - RNA, 19 nt, artificial
  Oligomer
caguaacuucccuaagauu

SEQ ID NO: 6287 - RNA, 19 nt, artificial
  Oligomer
cucaguuguucuuugucau

SEQ ID NO: 6288 - RNA, 19 nt, artificial
  Oligomer
gagcuacagaugaagaaga

SEQ ID NO: 6289 - RNA, 19 nt, artificial
  Oligomer
uguaaugguuuucccuuaa

SEQ ID NO: 6290 - RNA, 19 nt, artificial
  Oligomer
cuccuugugcuauaaaaua

SEQ ID NO: 6291 - RNA, 19 nt, artificial
  Oligomer
cauuuauguggagcucuau

SEQ ID NO: 6292 - RNA, 19 nt, artificial
  Oligomer
cuaucuucaaaaccaacua

SEQ ID NO: 6293 - RNA, 19 nt, artificial
  Oligomer
caagucagucugguacaaa

SEQ ID NO: 6294 - RNA, 19 nt, artificial
  Oligomer
cucaauaguauguucugaa

SEQ ID NO: 6295 - RNA, 19 nt, artificial
  Oligomer
gagagccagaugcaggaaa

SEQ ID NO: 6296 - RNA, 19 nt, artificial
  Oligomer
ugaaugcccgagucaauaa

SEQ ID NO: 6297 - RNA, 19 nt, artificial
  Oligomer
agaagaaggaaaccaagga

SEQ ID NO: 6298 - RNA, 19 nt, artificial
  Oligomer
ucuuggacucaauuuuaga

SEQ ID NO: 6299 - RNA, 19 nt, artificial
  Oligomer
uccagcuagcccuuaugaa

SEQ ID NO: 6300 - RNA, 19 nt, artificial
  Oligomer
gguucaaaauggaaguggg

SEQ ID NO: 6301 - RNA, 19 nt, artificial
  Oligomer
ugguuuaggaggaaaagga

SEQ ID NO: 6302 - RNA, 19 nt, artificial
  Oligomer
augcguggaaacuaccuaa

SEQ ID NO: 6303 - RNA, 19 nt, artificial
  Oligomer
aggagaaaagagaauggga

SEQ ID NO: 6304 - RNA, 19 nt, artificial
  Oligomer
cuaaccuaugugcauaauu

SEQ ID NO: 6305 - RNA, 19 nt, artificial
  Oligomer
uuagaaccacacaaugcca

SEQ ID NO: 6306 - RNA, 19 nt, artificial
  Oligomer
aguuaugaaaguagagaga

SEQ ID NO: 6307 - RNA, 19 nt, artificial
  Oligomer
gagagcacuuuuacaaaca

SEQ ID NO: 6308 - RNA, 19 nt, artificial
  Oligomer
cacacaaaauggaucgcau

SEQ ID NO: 6309 - RNA, 19 nt, artificial
  Oligomer
ggaaauaaggagaaaagag

SEQ ID NO: 6310 - RNA, 19 nt, artificial
  Oligomer
cccuucgcauccauucuca

SEQ ID NO: 6311 - RNA, 19 nt, artificial
  Oligomer
caugacucuggcucaucua

SEQ ID NO: 6312 - RNA, 19 nt, artificial
  Oligomer
agagcacuuuuacaaacau

SEQ ID NO: 6313 - RNA, 19 nt, artificial
  Oligomer
agaggguaccucaguuaua

SEQ ID NO: 6314 - RNA, 19 nt, artificial
  Oligomer
gaccugggagauaauucua

SEQ ID NO: 6315 - RNA, 19 nt, artificial
  Oligomer
guuauaaggagucugagaa

SEQ ID NO: 6316 - RNA, 19 nt, artificial
  Oligomer
auaacgccaccaaucugaa

SEQ ID NO: 6317 - RNA, 19 nt, artificial
  Oligomer
gauugauuggaguuaaugu

SEQ ID NO: 6318 - RNA, 19 nt, artificial
  Oligomer
cccuaauaccagaauagga

SEQ ID NO: 6319 - RNA, 19 nt, artificial
  Oligomer
gggacacacaugccuuuga

SEQ ID NO: 6320 - RNA, 19 nt, artificial
  Oligomer
agaaugggagagugagaga

SEQ ID NO: 6321 - RNA, 19 nt, artificial
  Oligomer
uggagcugaacgaauugua

SEQ ID NO: 6322 - RNA, 19 nt, artificial
  Oligomer
uacuccaguuuacuaauac

SEQ ID NO: 6323 - RNA, 19 nt, artificial
  Oligomer
gaugcaggaaaggaacaau

SEQ ID NO: 6324 - RNA, 19 nt, artificial
  Oligomer
gaagguuuuucuuaguucu

SEQ ID NO: 6325 - RNA, 19 nt, artificial
  Oligomer
gaaaggaucaaaagguuca

SEQ ID NO: 6326 - RNA, 19 nt, artificial
  Oligomer
gggucaagaacaggcuaag

SEQ ID NO: 6327 - RNA, 19 nt, artificial
  Oligomer
gugauaagcaggaguuuca

SEQ ID NO: 6328 - RNA, 19 nt, artificial
  Oligomer
agagugcuugucauuauaa

SEQ ID NO: 6329 - RNA, 19 nt, artificial
  Oligomer
auauaagagugcuugucau

SEQ ID NO: 6330 - RNA, 19 nt, artificial
  Oligomer
cugaaacccugaguaaaca

SEQ ID NO: 6331 - RNA, 19 nt, artificial
  Oligomer
ugggagagugagagaaaau

SEQ ID NO: 6332 - RNA, 19 nt, artificial
  Oligomer
cccuccuaugacuuggaaa

SEQ ID NO: 6333 - RNA, 19 nt, artificial
  Oligomer
aaaccaucgagcuacagau

SEQ ID NO: 6334 - RNA, 19 nt, artificial
  Oligomer
gagucucaggccaaucacu

SEQ ID NO: 6335 - RNA, 19 nt, artificial
  Oligomer
caguauugacaucugagca

SEQ ID NO: 6336 - RNA, 19 nt, artificial
  Oligomer
caccaaucugaagcucaaa

SEQ ID NO: 6337 - RNA, 19 nt, artificial
  Oligomer
guauuaccggguuuaugau

SEQ ID NO: 6338 - RNA, 19 nt, artificial
  Oligomer
cugaggguaggucugacaa

SEQ ID NO: 6339 - RNA, 19 nt, artificial
  Oligomer
gggauuauucaagggacua

SEQ ID NO: 6340 - RNA, 19 nt, artificial
  Oligomer
uguucuuugucauacuacu

SEQ ID NO: 6341 - RNA, 19 nt, artificial
  Oligomer
gagaggguaccucaguuau

SEQ ID NO: 6342 - RNA, 19 nt, artificial
  Oligomer
ugaaacccugaguaaacaa

SEQ ID NO: 6343 - RNA, 19 nt, artificial
  Oligomer
uggaaguuagggaaaagau

SEQ ID NO: 6344 - RNA, 19 nt, artificial
  Oligomer
gaucacaggccugaaacaa

SEQ ID NO: 6345 - RNA, 19 nt, artificial
  Oligomer
gaagacugguuuaggagga

SEQ ID NO: 6346 - RNA, 19 nt, artificial
  Oligomer
gggccagauguucuuucua

SEQ ID NO: 6347 - RNA, 19 nt, artificial
  Oligomer
aguuuggcugugcauaaua

SEQ ID NO: 6348 - RNA, 19 nt, artificial
  Oligomer
cacaaugccaagauagaau

SEQ ID NO: 6349 - RNA, 19 nt, artificial
  Oligomer
ucuacagaagaauauugga

SEQ ID NO: 6350 - RNA, 19 nt, artificial
  Oligomer
cuauuacugucauagacca

SEQ ID NO: 6351 - RNA, 19 nt, artificial
  Oligomer
cuuugagugguuugcagau

SEQ ID NO: 6352 - RNA, 19 nt, artificial
  Oligomer
cucagaauccucaaaauca

SEQ ID NO: 6353 - RNA, 19 nt, artificial
  Oligomer
agagaguuuggcugugcau

SEQ ID NO: 6354 - RNA, 19 nt, artificial
  Oligomer
agaugcaggaaaggaacaa

SEQ ID NO: 6355 - RNA, 19 nt, artificial
  Oligomer
cucuugccagucugucgaa

SEQ ID NO: 6356 - RNA, 19 nt, artificial
  Oligomer
accaaggaguagcuauaua

SEQ ID NO: 6357 - RNA, 19 nt, artificial
  Oligomer
cagaugcaggaaaggaaca

SEQ ID NO: 6358 - RNA, 19 nt, artificial
  Oligomer
auaaaaugguggcauggau

SEQ ID NO: 6359 - RNA, 19 nt, artificial
  Oligomer
cccgagucaauaauucuga

SEQ ID NO: 6360 - RNA, 19 nt, artificial
  Oligomer
aguucuucugcuuuugcaa

SEQ ID NO: 6361 - RNA, 19 nt, artificial
  Oligomer
cuggaguggcacccuuuua

SEQ ID NO: 6362 - RNA, 19 nt, artificial
  Oligomer
aagacugguuuaggaggaa

SEQ ID NO: 6363 - RNA, 19 nt, artificial
  Oligomer
auggaagugggacaauaca

SEQ ID NO: 6364 - RNA, 19 nt, artificial
  Oligomer
ggaagaaggagaaagagcu

SEQ ID NO: 6365 - RNA, 19 nt, artificial
  Oligomer
cagguacucuaagaaugau

SEQ ID NO: 6366 - RNA, 19 nt, artificial
  Oligomer
cuuucuaaccuaugugcau

SEQ ID NO: 6367 - RNA, 19 nt, artificial
  Oligomer
guguuauuacuaugaguca

SEQ ID NO: 6368 - RNA, 19 nt, artificial
  Oligomer
aggguucugcacauucuua

SEQ ID NO: 6369 - RNA, 19 nt, artificial
  Oligomer
gugugacuaaugguuuauu

SEQ ID NO: 6370 - RNA, 19 nt, artificial
  Oligomer
uguugagagugucucaaca

SEQ ID NO: 6371 - RNA, 19 nt, artificial
  Oligomer
ccauguuucuguaucucug

SEQ ID NO: 6372 - RNA, 19 nt, artificial
  Oligomer
uuuccucuguggaccugaa

SEQ ID NO: 6373 - RNA, 19 nt, artificial
  Oligomer
ucaguggaaguuagggaaa

SEQ ID NO: 6374 - RNA, 19 nt, artificial
  Oligomer
uuggcugugcauaauauaa

SEQ ID NO: 6375 - RNA, 19 nt, artificial
  Oligomer
ucugcacauucuuauuuga

SEQ ID NO: 6376 - RNA, 19 nt, artificial
  Oligomer
ucaacaaggaaaacuucua

SEQ ID NO: 6377 - RNA, 19 nt, artificial
  Oligomer
gagaauaaagaacccugaa

SEQ ID NO: 6378 - RNA, 19 nt, artificial
  Oligomer
ccaacugggauaaugaauu

SEQ ID NO: 6379 - RNA, 19 nt, artificial
  Oligomer
ugaagauguguucagcuau

SEQ ID NO: 6380 - RNA, 19 nt, artificial
  Oligomer
cuuaggaauugugacaaau

SEQ ID NO: 6381 - RNA, 19 nt, artificial
  Oligomer
cuuaaaggaaugucaaaga

SEQ ID NO: 6382 - RNA, 19 nt, artificial
  Oligomer
uccugcuccuugugcuaua

SEQ ID NO: 6383 - RNA, 19 nt, artificial
  Oligomer
aacaggcuaaggauacuaa

SEQ ID NO: 6384 - RNA, 19 nt, artificial
  Oligomer
ugcucaacaagaguucgaa

SEQ ID NO: 6385 - RNA, 19 nt, artificial
  Oligomer
aauuaacaacccagaaaca

SEQ ID NO: 6386 - RNA, 19 nt, artificial
  Oligomer
auacugagcugccucagaa

SEQ ID NO: 6387 - RNA, 19 nt, artificial
  Oligomer
gguaacugggccagauguu

SEQ ID NO: 6388 - RNA, 19 nt, artificial
  Oligomer
agacuucuuuaguauccau

SEQ ID NO: 6389 - RNA, 19 nt, artificial
  Oligomer
ggaauugugacaaauaugu

SEQ ID NO: 6390 - RNA, 19 nt, artificial
  Oligomer
cgauucacaccauugcaca

SEQ ID NO: 6391 - RNA, 19 nt, artificial
  Oligomer
aaagaagaaggaaaccaag

SEQ ID NO: 6392 - RNA, 19 nt, artificial
  Oligomer
aagucuuuugguacacaca

SEQ ID NO: 6393 - RNA, 19 nt, artificial
  Oligomer
gucauuuuugccaucauua

SEQ ID NO: 6394 - RNA, 19 nt, artificial
  Oligomer
cuaagauuaugaaacugug

SEQ ID NO: 6395 - RNA, 19 nt, artificial
  Oligomer
ccaucuuacuccagguuug

SEQ ID NO: 6396 - RNA, 19 nt, artificial
  Oligomer
agggucaagaacaggcuaa

SEQ ID NO: 6397 - RNA, 19 nt, artificial
  Oligomer
cauccauggagcugaacga

SEQ ID NO: 6398 - RNA, 19 nt, artificial
  Oligomer
cagaauccucaaaaucagu

SEQ ID NO: 6399 - RNA, 19 nt, artificial
  Oligomer
uggaagugggacaauacau

SEQ ID NO: 6400 - RNA, 19 nt, artificial
  Oligomer
acugugcucaacuauuaaa

SEQ ID NO: 6401 - RNA, 19 nt, artificial
  Oligomer
caucuuacuccagguuuga

SEQ ID NO: 6402 - RNA, 19 nt, artificial
  Oligomer
aggccugcugugcgaauau

SEQ ID NO: 6403 - RNA, 19 nt, artificial
  Oligomer
ugaagcucaaaaagaucua

SEQ ID NO: 6404 - RNA, 19 nt, artificial
  Oligomer
aguuguucuuugucauacu

SEQ ID NO: 6405 - RNA, 19 nt, artificial
  Oligomer
gagcacuuuuacaaacauu

SEQ ID NO: 6406 - RNA, 19 nt, artificial
  Oligomer
aacucuucaacuucgguaa

SEQ ID NO: 6407 - RNA, 19 nt, artificial
  Oligomer
cccugcuuaaaaauggaca

SEQ ID NO: 6408 - RNA, 19 nt, artificial
  Oligomer
gaugcguggaaacuaccua

SEQ ID NO: 6409 - RNA, 19 nt, artificial
  Oligomer
uagcccuuaugaauauuga

SEQ ID NO: 6410 - RNA, 19 nt, artificial
  Oligomer
guuguucuuugucauacua

SEQ ID NO: 6411 - RNA, 19 nt, artificial
  Oligomer
agagcaggguuuucuuuuu

SEQ ID NO: 6412 - RNA, 19 nt, artificial
  Oligomer
ugucauuuuugccaucauu

SEQ ID NO: 6413 - RNA, 19 nt, artificial
  Oligomer
cuuggagccacaaauguuu

SEQ ID NO: 6414 - RNA, 19 nt, artificial
  Oligomer
caacacccuaauaccagaa

SEQ ID NO: 6415 - RNA, 19 nt, artificial
  Oligomer
agcauacuccaguuuacua

SEQ ID NO: 6416 - RNA, 19 nt, artificial
  Oligomer
agugcccaaagguguccaa

SEQ ID NO: 6417 - RNA, 19 nt, artificial
  Oligomer
aggguuuucuuuuuguucu

SEQ ID NO: 6418 - RNA, 19 nt, artificial
  Oligomer
guggaaguuagggaaaaga

SEQ ID NO: 6419 - RNA, 19 nt, artificial
  Oligomer
cagguaucaauucaucuau

SEQ ID NO: 6420 - RNA, 19 nt, artificial
  Oligomer
gccuuugagugguuugcag

SEQ ID NO: 6421 - RNA, 19 nt, artificial
  Oligomer
aauguggaaugguguguga

SEQ ID NO: 6422 - RNA, 19 nt, artificial
  Oligomer
acuucccuaagauuaugaa

SEQ ID NO: 6423 - RNA, 19 nt, artificial
  Oligomer
aggaaaacuucuaacuugu

SEQ ID NO: 6424 - RNA, 19 nt, artificial
  Oligomer
aaagagaaugggagaguga

SEQ ID NO: 6425 - RNA, 19 nt, artificial
  Oligomer
gguggagaauuaaccuccu

SEQ ID NO: 6426 - RNA, 19 nt, artificial
  Oligomer
ggaguuaauguaauacuca

SEQ ID NO: 6427 - RNA, 19 nt, artificial
  Oligomer
gggauaaugaauucaagac

SEQ ID NO: 6428 - RNA, 19 nt, artificial
  Oligomer
agagaauaaagaacccuga

SEQ ID NO: 6429 - RNA, 19 nt, artificial
  Oligomer
acaccauugcacaucuauu

SEQ ID NO: 6430 - RNA, 19 nt, artificial
  Oligomer
gcuaaggauacuaaccaau

SEQ ID NO: 6431 - RNA, 19 nt, artificial
  Oligomer
aaugaggaagaaggagaaa

SEQ ID NO: 6432 - RNA, 19 nt, artificial
  Oligomer
ucaaaagggaaaggaucaa

SEQ ID NO: 6433 - RNA, 19 nt, artificial
  Oligomer
aggaagacuucuuuaguau

SEQ ID NO: 6434 - RNA, 19 nt, artificial
  Oligomer
uuuggcugugcauaauaua

SEQ ID NO: 6435 - RNA, 19 nt, artificial
  Oligomer
uagggaaaagauucuugga

SEQ ID NO: 6436 - RNA, 19 nt, artificial
  Oligomer
caaggaaaacuucuaacuu

SEQ ID NO: 6437 - RNA, 19 nt, artificial
  Oligomer
cugcacauucuuauuugaa

SEQ ID NO: 6438 - RNA, 19 nt, artificial
  Oligomer
gaaggaaauuuuccagauc

SEQ ID NO: 6439 - RNA, 19 nt, artificial
  Oligomer
uacagagaucaaauucaca

SEQ ID NO: 6440 - RNA, 19 nt, artificial
  Oligomer
uccucagcuacaacaucua

SEQ ID NO: 6441 - RNA, 19 nt, artificial
  Oligomer
gaaaccaaggaguagcuau

SEQ ID NO: 6442 - RNA, 19 nt, artificial
  Oligomer
uucuuaaaacugugcucaa

SEQ ID NO: 6443 - RNA, 19 nt, artificial
  Oligomer
ggauagugggucccauguu

SEQ ID NO: 6444 - RNA, 19 nt, artificial
  Oligomer
gucgaaaucugcuguccuu

SEQ ID NO: 6445 - RNA, 19 nt, artificial
  Oligomer
accugaagccuuggcugaa

SEQ ID NO: 6446 - RNA, 19 nt, artificial
  Oligomer
aguccugcuccuugugcua

SEQ ID NO: 6447 - RNA, 19 nt, artificial
  Oligomer
ggaguagcuauauauuucu

SEQ ID NO: 6448 - RNA, 19 nt, artificial
  Oligomer
aauaaggccugcugugcga

SEQ ID NO: 6449 - RNA, 19 nt, artificial
  Oligomer
uuuugagagcacuuuuaca

SEQ ID NO: 6450 - RNA, 19 nt, artificial
  Oligomer
ucaagaugcguggaaacua

SEQ ID NO: 6451 - RNA, 19 nt, artificial
  Oligomer
agggacuaggaugaacuaa

SEQ ID NO: 6452 - RNA, 19 nt, artificial
  Oligomer
cugcuuaaaaauggacaaa

SEQ ID NO: 6453 - RNA, 19 nt, artificial
  Oligomer
ucagaauccucaaaaucag

SEQ ID NO: 6454 - RNA, 19 nt, artificial
  Oligomer
uagggucaagaacaggcua

SEQ ID NO: 6455 - RNA, 19 nt, artificial
  Oligomer
ggaggucuuacuuugaagu

SEQ ID NO: 6456 - RNA, 19 nt, artificial
  Oligomer
cccuguguuauccaguuau

SEQ ID NO: 6457 - RNA, 19 nt, artificial
  Oligomer
agagugucucaacacuuau

SEQ ID NO: 6458 - RNA, 19 nt, artificial
  Oligomer
agcacuuaguauuuagcau

SEQ ID NO: 6459 - RNA, 19 nt, artificial
  Oligomer
guucuuugucauacuacua

SEQ ID NO: 6460 - RNA, 19 nt, artificial
  Oligomer
agcuagcccuuaugaauau

SEQ ID NO: 6461 - RNA, 19 nt, artificial
  Oligomer
agucaacacccuaauacca

SEQ ID NO: 6462 - RNA, 19 nt, artificial
  Oligomer
aacaacccagaaacaaaaa

SEQ ID NO: 6463 - RNA, 19 nt, artificial
  Oligomer
ccgagaguguuucuccaag

SEQ ID NO: 6464 - RNA, 19 nt, artificial
  Oligomer
guuagugggagcagggauu

SEQ ID NO: 6465 - RNA, 19 nt, artificial
  Oligomer
ggaugguuucugcuuagag

SEQ ID NO: 6466 - RNA, 19 nt, artificial
  Oligomer
cucccuagggucaagaaca

SEQ ID NO: 6467 - RNA, 19 nt, artificial
  Oligomer
uggcugaaacccugaguaa

SEQ ID NO: 6468 - RNA, 19 nt, artificial
  Oligomer
uaucacuuccuccaccaaa

SEQ ID NO: 6469 - RNA, 19 nt, artificial
  Oligomer
aauacuugcaggcuuugua

SEQ ID NO: 6470 - RNA, 19 nt, artificial
  Oligomer
uacugagcugccucagaau

SEQ ID NO: 6471 - RNA, 19 nt, artificial
  Oligomer
cagagagcggauacucaag

SEQ ID NO: 6472 - RNA, 19 nt, artificial
  Oligomer
cagucugucgaaaucugcu

SEQ ID NO: 6473 - RNA, 19 nt, artificial
  Oligomer
gaauauauguucaagagag

SEQ ID NO: 6474 - RNA, 19 nt, artificial
  Oligomer
caggaaucucaccuuucau

SEQ ID NO: 6475 - RNA, 19 nt, artificial
  Oligomer
caagggacuaggaugaacu

SEQ ID NO: 6476 - RNA, 19 nt, artificial
  Oligomer
guaaugaggaagaaggaga

SEQ ID NO: 6477 - RNA, 19 nt, artificial
  Oligomer
gggucccauguuucuguau

SEQ ID NO: 6478 - RNA, 19 nt, artificial
  Oligomer
uuucuaaccuaugugcaua

SEQ ID NO: 6479 - RNA, 19 nt, artificial
  Oligomer
ugggucccauguuucugua

SEQ ID NO: 6480 - RNA, 19 nt, artificial
  Oligomer
gacuucuuuaguauccaua

SEQ ID NO: 6481 - RNA, 19 nt, artificial
  Oligomer
aguaaacaaagcaucucca

SEQ ID NO: 6482 - RNA, 19 nt, artificial
  Oligomer
gcccuguguuauccaguua

SEQ ID NO: 6483 - RNA, 19 nt, artificial
  Oligomer
gcuacaacaucuaccucac

SEQ ID NO: 6484 - RNA, 19 nt, artificial
  Oligomer
gcugaaacccugaguaaac

SEQ ID NO: 6485 - RNA, 19 nt, artificial
  Oligomer
aggaggaaaaggaaauaag

SEQ ID NO: 6486 - RNA, 19 nt, artificial
  Oligomer
gccugcugugcgaauauag

SEQ ID NO: 6487 - RNA, 19 nt, artificial
  Oligomer
augagguggugauguuagu

SEQ ID NO: 6488 - RNA, 19 nt, artificial
  Oligomer
ucuugccagucugucgaaa

SEQ ID NO: 6489 - RNA, 19 nt, artificial
  Oligomer
cccagauuucuuaaaguuu

SEQ ID NO: 6490 - RNA, 19 nt, artificial
  Oligomer
guuucugcuuagagacacu

SEQ ID NO: 6491 - RNA, 19 nt, artificial
  Oligomer
guggguugugcugccaaau

SEQ ID NO: 6492 - RNA, 19 nt, artificial
  Oligomer
gucucaggccaaucacuuu

SEQ ID NO: 6493 - RNA, 19 nt, artificial
  Oligomer
gauucuuggacucaauuuu

SEQ ID NO: 6494 - RNA, 19 nt, artificial
  Oligomer
ugguuuucccuuaaaggaa

SEQ ID NO: 6495 - RNA, 19 nt, artificial
  Oligomer
gguugugcugccaaaugcu

SEQ ID NO: 6496 - RNA, 19 nt, artificial
  Oligomer
gagacaggcaaaaugaaag

SEQ ID NO: 6497 - RNA, 19 nt, artificial
  Oligomer
uccuaaaauuaacaaccca

SEQ ID NO: 6498 - RNA, 19 nt, artificial
  Oligomer
cuuuuaaaaucuggucaca

SEQ ID NO: 6499 - RNA, 19 nt, artificial
  Oligomer
caaucugaagcucaaaaag

SEQ ID NO: 6500 - RNA, 19 nt, artificial
  Oligomer
aaggguucugcacauucuu

SEQ ID NO: 6501 - RNA, 19 nt, artificial
  Oligomer
uucugauccuuauucagua

SEQ ID NO: 6502 - RNA, 19 nt, artificial
  Oligomer
guuucaauucuuuacacca

SEQ ID NO: 6503 - RNA, 19 nt, artificial
  Oligomer
cugugauaagcaggaguuu

SEQ ID NO: 6504 - RNA, 19 nt, artificial
  Oligomer
ggagccacaaauguuuaga

SEQ ID NO: 6505 - RNA, 19 nt, artificial
  Oligomer
ucaccaagguggucacuca

SEQ ID NO: 6506 - RNA, 19 nt, artificial
  Oligomer
uguauuaguaaacuggagu

SEQ ID NO: 6507 - RNA, 19 nt, artificial
  Oligomer
gugauaauuaauaugaggc

SEQ ID NO: 6508 - RNA, 19 nt, artificial
  Oligomer
uuccuuuuccuccuaaacc

SEQ ID NO: 6509 - RNA, 19 nt, artificial
  Oligomer
uuuauuuucucucacucuc

SEQ ID NO: 6510 - RNA, 19 nt, artificial
  Oligomer
uuacugaaccuuuugaucc

SEQ ID NO: 6511 - RNA, 19 nt, artificial
  Oligomer
auuaauaugaggcacagcg

SEQ ID NO: 6512 - RNA, 19 nt, artificial
  Oligomer
uuuauaaugacaagcacuc

SEQ ID NO: 6513 - RNA, 19 nt, artificial
  Oligomer
uuauuuucucucacucucc

SEQ ID NO: 6514 - RNA, 19 nt, artificial
  Oligomer
uuuaguucauccuaguccc

SEQ ID NO: 6515 - RNA, 19 nt, artificial
  Oligomer
uuuaggaugaugaugauga

SEQ ID NO: 6516 - RNA, 19 nt, artificial
  Oligomer
uuucauuuugccugucucc

SEQ ID NO: 6517 - RNA, 19 nt, artificial
  Oligomer
uccuucuuccucauuaccg

SEQ ID NO: 6518 - RNA, 19 nt, artificial
  Oligomer
uguuauauuaugcacagcc

SEQ ID NO: 6519 - RNA, 19 nt, artificial
  Oligomer
cuugaauucauuaucccag

SEQ ID NO: 6520 - RNA, 19 nt, artificial
  Oligomer
uucagaaaggcuauauucg

SEQ ID NO: 6521 - RNA, 19 nt, artificial
  Oligomer
uuugggcaggaaauuaguc

SEQ ID NO: 6522 - RNA, 19 nt, artificial
  Oligomer
ugucuugaauucauuaucc

SEQ ID NO: 6523 - RNA, 19 nt, artificial
  Oligomer
uuccuuuccugcaucuggc

SEQ ID NO: 6524 - RNA, 19 nt, artificial
  Oligomer
uggaauaucauaaacccgg

SEQ ID NO: 6525 - RNA, 19 nt, artificial
  Oligomer
auaacuuucauuuugccug

SEQ ID NO: 6526 - RNA, 19 nt, artificial
  Oligomer
auuggccugagacucaucc

SEQ ID NO: 6527 - RNA, 19 nt, artificial
  Oligomer
uugagaucgccaaaaccgc

SEQ ID NO: 6528 - RNA, 19 nt, artificial
  Oligomer
uugaagauagaaaaccuug

SEQ ID NO: 6529 - RNA, 19 nt, artificial
  Oligomer
uugaaaaugaaaugcacuc

SEQ ID NO: 6530 - RNA, 19 nt, artificial
  Oligomer
uaucuuggcauuguguggu

SEQ ID NO: 6531 - RNA, 19 nt, artificial
  Oligomer
aaucuuuucccuaacuucc

SEQ ID NO: 6532 - RNA, 19 nt, artificial
  Oligomer
uugggcaggaaauuagucu

SEQ ID NO: 6533 - RNA, 19 nt, artificial
  Oligomer
uugguuaguauccuuagcc

SEQ ID NO: 6534 - RNA, 19 nt, artificial
  Oligomer
uucauuuugccugucucca

SEQ ID NO: 6535 - RNA, 19 nt, artificial
  Oligomer
ucuugaauucauuauccca

SEQ ID NO: 6536 - RNA, 19 nt, artificial
  Oligomer
uugaaauucaggcaggcug

SEQ ID NO: 6537 - RNA, 19 nt, artificial
  Oligomer
cuguugaauagaugaauug

SEQ ID NO: 6538 - RNA, 19 nt, artificial
  Oligomer
uuggugaugaccaccuucu

SEQ ID NO: 6539 - RNA, 19 nt, artificial
  Oligomer
uuucagaaaggcuauauuc

SEQ ID NO: 6540 - RNA, 19 nt, artificial
  Oligomer
auuuugaggauucugaggc

SEQ ID NO: 6541 - RNA, 19 nt, artificial
  Oligomer
uuuuccuccuaaaccaguc

SEQ ID NO: 6542 - RNA, 19 nt, artificial
  Oligomer
uugaauucauuaucccagu

SEQ ID NO: 6543 - RNA, 19 nt, artificial
  Oligomer
uuuucccuaacuuccacug

SEQ ID NO: 6544 - RNA, 19 nt, artificial
  Oligomer
uugagaauggaugcgaagg

SEQ ID NO: 6545 - RNA, 19 nt, artificial
  Oligomer
aagaacaaaaagaaaaccc

SEQ ID NO: 6546 - RNA, 19 nt, artificial
  Oligomer
uuaauucuccaccuccaac

SEQ ID NO: 6547 - RNA, 19 nt, artificial
  Oligomer
uauuuucucucacucuccc

SEQ ID NO: 6548 - RNA, 19 nt, artificial
  Oligomer
ugcuguauuaguaaacugg

SEQ ID NO: 6549 - RNA, 19 nt, artificial
  Oligomer
auccuuucccuuuugauuc

SEQ ID NO: 6550 - RNA, 19 nt, artificial
  Oligomer
uaaaccauuagucacacag

SEQ ID NO: 6551 - RNA, 19 nt, artificial
  Oligomer
uuagaaguuuuccuuguug

SEQ ID NO: 6552 - RNA, 19 nt, artificial
  Oligomer
uuugucagaccuacccuca

SEQ ID NO: 6553 - RNA, 19 nt, artificial
  Oligomer
ugugaucacaucuuucucc

SEQ ID NO: 6554 - RNA, 19 nt, artificial
  Oligomer
ugaagugcaaucauccaug

SEQ ID NO: 6555 - RNA, 19 nt, artificial
  Oligomer
uuuccacgcaucuugaaac

SEQ ID NO: 6556 - RNA, 19 nt, artificial
  Oligomer
aucuuucuccucaucaugg

SEQ ID NO: 6557 - RNA, 19 nt, artificial
  Oligomer
uaaguguugagacacucuc

SEQ ID NO: 6558 - RNA, 19 nt, artificial
  Oligomer
uuuuguguguguauuuacg

SEQ ID NO: 6559 - RNA, 19 nt, artificial
  Oligomer
uugguuuccuucuucuuuu

SEQ ID NO: 6560 - RNA, 19 nt, artificial
  Oligomer
uuguccauuuuuaagcagg

SEQ ID NO: 6561 - RNA, 19 nt, artificial
  Oligomer
uugaggauucugaggcagc

SEQ ID NO: 6562 - RNA, 19 nt, artificial
  Oligomer
uuaguaaacuggaguaugc

SEQ ID NO: 6563 - RNA, 19 nt, artificial
  Oligomer
uuuguguguguauuuacgg

SEQ ID NO: 6564 - RNA, 19 nt, artificial
  Oligomer
uucaucuguagcucgaugg

SEQ ID NO: 6565 - RNA, 19 nt, artificial
  Oligomer
uuauguccuaaugaucugg

SEQ ID NO: 6566 - RNA, 19 nt, artificial
  Oligomer
uguaaaagaacuuaggugg

SEQ ID NO: 6567 - RNA, 19 nt, artificial
  Oligomer
uuuaguucccagaaauggg

SEQ ID NO: 6568 - RNA, 19 nt, artificial
  Oligomer
ucaguauguguauaccucc

SEQ ID NO: 6569 - RNA, 19 nt, artificial
  Oligomer
auucauaagggcuagcugg

SEQ ID NO: 6570 - RNA, 19 nt, artificial
  Oligomer
aucagaauuauugacucgg

SEQ ID NO: 6571 - RNA, 19 nt, artificial
  Oligomer
uugagugugaauuugaucu

SEQ ID NO: 6572 - RNA, 19 nt, artificial
  Oligomer
aaccuuuugauccuuuccc

SEQ ID NO: 6573 - RNA, 19 nt, artificial
  Oligomer
uuaugcacagccaaacucu

SEQ ID NO: 6574 - RNA, 19 nt, artificial
  Oligomer
augcaguugaaauucaggc

SEQ ID NO: 6575 - RNA, 19 nt, artificial
  Oligomer
uuuccuuuuccuccuaaac

SEQ ID NO: 6576 - RNA, 19 nt, artificial
  Oligomer
uaaaagugcucucaaaacc

SEQ ID NO: 6577 - RNA, 19 nt, artificial
  Oligomer
uuguugagcagcacgcacu

SEQ ID NO: 6578 - RNA, 19 nt, artificial
  Oligomer
uucuccuucuuccucauua

SEQ ID NO: 6579 - RNA, 19 nt, artificial
  Oligomer
aagaggaagacguucaacc

SEQ ID NO: 6580 - RNA, 19 nt, artificial
  Oligomer
ucuaucuuggcauugugug

SEQ ID NO: 6581 - RNA, 19 nt, artificial
  Oligomer
uacuaaagaagucuuccuc

SEQ ID NO: 6582 - RNA, 19 nt, artificial
  Oligomer
uucaauauucauaagggcu

SEQ ID NO: 6583 - RNA, 19 nt, artificial
  Oligomer
uuuuaguucccagaaaugg

SEQ ID NO: 6584 - RNA, 19 nt, artificial
  Oligomer
aucuuagguaguuuccacg

SEQ ID NO: 6585 - RNA, 19 nt, artificial
  Oligomer
uuguguaaaagaacuuagg

SEQ ID NO: 6586 - RNA, 19 nt, artificial
  Oligomer
ucauuaucccaguugggcc

SEQ ID NO: 6587 - RNA, 19 nt, artificial
  Oligomer
uuuucucucacucucccau

SEQ ID NO: 6588 - RNA, 19 nt, artificial
  Oligomer
uugacucgggcauucacac

SEQ ID NO: 6589 - RNA, 19 nt, artificial
  Oligomer
ucauaaacccgguaauacc

SEQ ID NO: 6590 - RNA, 19 nt, artificial
  Oligomer
ucuuucuccuucuuccuca

SEQ ID NO: 6591 - RNA, 19 nt, artificial
  Oligomer
uucacuggcagugccaaag

SEQ ID NO: 6592 - RNA, 19 nt, artificial
  Oligomer
uaaaacugguuuuaguucc

SEQ ID NO: 6593 - RNA, 19 nt, artificial
  Oligomer
auuuguaccagacugacuu

SEQ ID NO: 6594 - RNA, 19 nt, artificial
  Oligomer
uguggaaagaguaucaaac

SEQ ID NO: 6595 - RNA, 19 nt, artificial
  Oligomer
uucuguagaaagaacaucu

SEQ ID NO: 6596 - RNA, 19 nt, artificial
  Oligomer
uuuacucaggguuucagcc

SEQ ID NO: 6597 - RNA, 19 nt, artificial
  Oligomer
uuucagccaaggcuucagg

SEQ ID NO: 6598 - RNA, 19 nt, artificial
  Oligomer
uuuugauccuuucccuuuu

SEQ ID NO: 6599 - RNA, 19 nt, artificial
  Oligomer
uugaaacuccugcuuauca

SEQ ID NO: 6600 - RNA, 19 nt, artificial
  Oligomer
ugcacagccaaacucucug

SEQ ID NO: 6601 - RNA, 19 nt, artificial
  Oligomer
uucuuccucauuaccgaag

SEQ ID NO: 6602 - RNA, 19 nt, artificial
  Oligomer
uuccuuuggucuaugacag

SEQ ID NO: 6603 - RNA, 19 nt, artificial
  Oligomer
uuugacauuccuuuaaggg

SEQ ID NO: 6604 - RNA, 19 nt, artificial
  Oligomer
augugcagaacccuucagg

SEQ ID NO: 6605 - RNA, 19 nt, artificial
  Oligomer
uuugucacaauuccuaagu

SEQ ID NO: 6606 - RNA, 19 nt, artificial
  Oligomer
uuuggcagcacaacccaca

SEQ ID NO: 6607 - RNA, 19 nt, artificial
  Oligomer
ucuccuuauuuccuuuucc

SEQ ID NO: 6608 - RNA, 19 nt, artificial
  Oligomer
aagaaaacccugcucuugg

SEQ ID NO: 6609 - RNA, 19 nt, artificial
  Oligomer
uuuuguuucuggguuguua

SEQ ID NO: 6610 - RNA, 19 nt, artificial
  Oligomer
ucucacucucccauucucu

SEQ ID NO: 6611 - RNA, 19 nt, artificial
  Oligomer
acuuugggcaggaaauuag

SEQ ID NO: 6612 - RNA, 19 nt, artificial
  Oligomer
uuugaaagggugagugacc

SEQ ID NO: 6613 - RNA, 19 nt, artificial
  Oligomer
uugccugucuccaaguuca

SEQ ID NO: 6614 - RNA, 19 nt, artificial
  Oligomer
uccauuuccaagucauagg

SEQ ID NO: 6615 - RNA, 19 nt, artificial
  Oligomer
augaucuggaaaauuuccu

SEQ ID NO: 6616 - RNA, 19 nt, artificial
  Oligomer
uccuuauuuccuuuuccuc

SEQ ID NO: 6617 - RNA, 19 nt, artificial
  Oligomer
uuauaacugagguacccuc

SEQ ID NO: 6618 - RNA, 19 nt, artificial
  Oligomer
ugugguucuaaauucauuc

SEQ ID NO: 6619 - RNA, 19 nt, artificial
  Oligomer
uucuaaacauuuguggcuc

SEQ ID NO: 6620 - RNA, 19 nt, artificial
  Oligomer
uucuucuguagaaagaaca

SEQ ID NO: 6621 - RNA, 19 nt, artificial
  Oligomer
uucauuaucccaguugggc

SEQ ID NO: 6622 - RNA, 19 nt, artificial
  Oligomer
uuuuugagcuucagauugg

SEQ ID NO: 6623 - RNA, 19 nt, artificial
  Oligomer
ugaagauagaaaaccuugg

SEQ ID NO: 6624 - RNA, 19 nt, artificial
  Oligomer
auuuuauagcacaaggagc

SEQ ID NO: 6625 - RNA, 19 nt, artificial
  Oligomer
uuuuaauaguugagcacag

SEQ ID NO: 6626 - RNA, 19 nt, artificial
  Oligomer
uuaaauagaugugcaaugg

SEQ ID NO: 6627 - RNA, 19 nt, artificial
  Oligomer
ucucuuucgagcaaaauug

SEQ ID NO: 6628 - RNA, 19 nt, artificial
  Oligomer
uuucucucacucucccauu

SEQ ID NO: 6629 - RNA, 19 nt, artificial
  Oligomer
uagagcuccacauaaaugu

SEQ ID NO: 6630 - RNA, 19 nt, artificial
  Oligomer
uaaagaagucuuccucagg

SEQ ID NO: 6631 - RNA, 19 nt, artificial
  Oligomer
uuauuugagcauuuggcag

SEQ ID NO: 6632 - RNA, 19 nt, artificial
  Oligomer
ucuuagguaguuuccacgc

SEQ ID NO: 6633 - RNA, 19 nt, artificial
  Oligomer
ugaaacaauaaacagagcc

SEQ ID NO: 6634 - RNA, 19 nt, artificial
  Oligomer
uuuuaggaugaugaugaug

SEQ ID NO: 6635 - RNA, 19 nt, artificial
  Oligomer
auccauuuccaagucauag

SEQ ID NO: 6636 - RNA, 19 nt, artificial
  Oligomer
uuaauaguugagcacaguu

SEQ ID NO: 6637 - RNA, 19 nt, artificial
  Oligomer
uuuguuucuggguuguuaa

SEQ ID NO: 6638 - RNA, 19 nt, artificial
  Oligomer
auuaacuccaaucaaucca

SEQ ID NO: 6639 - RNA, 19 nt, artificial
  Oligomer
uuuugguggaggaagugau

SEQ ID NO: 6640 - RNA, 19 nt, artificial
  Oligomer
ucccacuaacaucaccacc

SEQ ID NO: 6641 - RNA, 19 nt, artificial
  Oligomer
auugacucgggcauucaca

SEQ ID NO: 6642 - RNA, 19 nt, artificial
  Oligomer
uuuugaaagggugagugac

SEQ ID NO: 6643 - RNA, 19 nt, artificial
  Oligomer
cugguuuuaauuaugcaca

SEQ ID NO: 6644 - RNA, 19 nt, artificial
  Oligomer
ccuuauuuccuuuuccucc

SEQ ID NO: 6645 - RNA, 19 nt, artificial
  Oligomer
auugaguccaagaaucuuu

SEQ ID NO: 6646 - RNA, 19 nt, artificial
  Oligomer
auuauucacauacaaagcc

SEQ ID NO: 6647 - RNA, 19 nt, artificial
  Oligomer
uuuguuuacucaggguuuc

SEQ ID NO: 6648 - RNA, 19 nt, artificial
  Oligomer
uugaguccaagaaucuuuu

SEQ ID NO: 6649 - RNA, 19 nt, artificial
  Oligomer
uuuagagacucucucuuga

SEQ ID NO: 6650 - RNA, 19 nt, artificial
  Oligomer
ucucucucccuuuugccuu

SEQ ID NO: 6651 - RNA, 19 nt, artificial
  Oligomer
ugcuucaucauucuuagag

SEQ ID NO: 6652 - RNA, 19 nt, artificial
  Oligomer
aucuggaaaauuuccuuca

SEQ ID NO: 6653 - RNA, 19 nt, artificial
  Oligomer
uucccuaacuuccacugac

SEQ ID NO: 6654 - RNA, 19 nt, artificial
  Oligomer
uucuccuuauuuccuuuuc

SEQ ID NO: 6655 - RNA, 19 nt, artificial
  Oligomer
uuugauccuuucccuuuug

SEQ ID NO: 6656 - RNA, 19 nt, artificial
  Oligomer
aauauauagcuacuccuug

SEQ ID NO: 6657 - RNA, 19 nt, artificial
  Oligomer
ucuuggcauugugugguuc

SEQ ID NO: 6658 - RNA, 19 nt, artificial
  Oligomer
augacaacuccagugaugc

SEQ ID NO: 6659 - RNA, 19 nt, artificial
  Oligomer
uucucucacucucccauuc

SEQ ID NO: 6660 - RNA, 19 nt, artificial
  Oligomer
uccuguccaguugucuucg

SEQ ID NO: 6661 - RNA, 19 nt, artificial
  Oligomer
uuuaagggaaaaccauuac

SEQ ID NO: 6662 - RNA, 19 nt, artificial
  Oligomer
uuccacugacauuacugag

SEQ ID NO: 6663 - RNA, 19 nt, artificial
  Oligomer
aaacaaugcuucaucauuc

SEQ ID NO: 6664 - RNA, 19 nt, artificial
  Oligomer
auuaguaaacuggaguaug

SEQ ID NO: 6665 - RNA, 19 nt, artificial
  Oligomer
uauuugucagaccuacccu

SEQ ID NO: 6666 - RNA, 19 nt, artificial
  Oligomer
acugacuugagaauggaug

SEQ ID NO: 6667 - RNA, 19 nt, artificial
  Oligomer
uguugagaucgccaaaacc

SEQ ID NO: 6668 - RNA, 19 nt, artificial
  Oligomer
ucugguauuaggguguuga

SEQ ID NO: 6669 - RNA, 19 nt, artificial
  Oligomer
uugcaauugucuugaauuc

SEQ ID NO: 6670 - RNA, 19 nt, artificial
  Oligomer
uauauucgcacagcaggcc

SEQ ID NO: 6671 - RNA, 19 nt, artificial
  Oligomer
uaagaugggcuagaucugg

SEQ ID NO: 6672 - RNA, 19 nt, artificial
  Oligomer
uuggagaugcuuuguuuac

SEQ ID NO: 6673 - RNA, 19 nt, artificial
  Oligomer
uauuuacggaaaauaaggg

SEQ ID NO: 6674 - RNA, 19 nt, artificial
  Oligomer
uacccucuccaguucauac

SEQ ID NO: 6675 - RNA, 19 nt, artificial
  Oligomer
guugagaucgccaaaaccg

SEQ ID NO: 6676 - RNA, 19 nt, artificial
  Oligomer
uuauagcacaaggagcagg

SEQ ID NO: 6677 - RNA, 19 nt, artificial
  Oligomer
uaauuaauaugaggcacag

SEQ ID NO: 6678 - RNA, 19 nt, artificial
  Oligomer
ucaucauucuuagaguacc

SEQ ID NO: 6679 - RNA, 19 nt, artificial
  Oligomer
aauaagaaugugcagaacc

SEQ ID NO: 6680 - RNA, 19 nt, artificial
  Oligomer
ucuuuucuccuuauuuccu

SEQ ID NO: 6681 - RNA, 19 nt, artificial
  Oligomer
uucuaucuuggcauugugu

SEQ ID NO: 6682 - RNA, 19 nt, artificial
  Oligomer
uaguucauccuagucccuu

SEQ ID NO: 6683 - RNA, 19 nt, artificial
  Oligomer
uucuucuucaucuguagcu

SEQ ID NO: 6684 - RNA, 19 nt, artificial
  Oligomer
auucacauacaaagccugc

SEQ ID NO: 6685 - RNA, 19 nt, artificial
  Oligomer
auaagaaugugcagaaccc

SEQ ID NO: 6686 - RNA, 19 nt, artificial
  Oligomer
auccuauugguuaguaucc

SEQ ID NO: 6687 - RNA, 19 nt, artificial
  Oligomer
ucaacauguauuauguccu

SEQ ID NO: 6688 - RNA, 19 nt, artificial
  Oligomer
uucaucauucuuagaguac

SEQ ID NO: 6689 - RNA, 19 nt, artificial
  Oligomer
auggauggcaaggccaaug

SEQ ID NO: 6690 - RNA, 19 nt, artificial
  Oligomer
cuucaaaguaagaccuccg

SEQ ID NO: 6691 - RNA, 19 nt, artificial
  Oligomer
uaacugagguacccucucc

SEQ ID NO: 6692 - RNA, 19 nt, artificial
  Oligomer
cucaaaaccauagagcucc

SEQ ID NO: 6693 - RNA, 19 nt, artificial
  Oligomer
uuucauaaucuuagggaag

SEQ ID NO: 6694 - RNA, 19 nt, artificial
  Oligomer
agaauuaucucccaggucc

SEQ ID NO: 6695 - RNA, 19 nt, artificial
  Oligomer
uaaaccagucuucugcccu

SEQ ID NO: 6696 - RNA, 19 nt, artificial
  Oligomer
uguagaaagaacaucuggc

SEQ ID NO: 6697 - RNA, 19 nt, artificial
  Oligomer
augacaaaaauggagagcc

SEQ ID NO: 6698 - RNA, 19 nt, artificial
  Oligomer
aucacagccacaagcauug

SEQ ID NO: 6699 - RNA, 19 nt, artificial
  Oligomer
uauuuaguucauccuaguc

SEQ ID NO: 6700 - RNA, 19 nt, artificial
  Oligomer
ucuggguuguuaauuuuag

SEQ ID NO: 6701 - RNA, 19 nt, artificial
  Oligomer
uacuugaguauccgcucuc

SEQ ID NO: 6702 - RNA, 19 nt, artificial
  Oligomer
ucugcaaaccacucaaagg

SEQ ID NO: 6703 - RNA, 19 nt, artificial
  Oligomer
uaacaucaccaccucauag

SEQ ID NO: 6704 - RNA, 19 nt, artificial
  Oligomer
uuauucacauacaaagccu

SEQ ID NO: 6705 - RNA, 19 nt, artificial
  Oligomer
uuuguuucaggccugugau

SEQ ID NO: 6706 - RNA, 19 nt, artificial
  Oligomer
uucucuuucgagcaaaauu

SEQ ID NO: 6707 - RNA, 19 nt, artificial
  Oligomer
aaugaucuggaaaauuucc

SEQ ID NO: 6708 - RNA, 19 nt, artificial
  Oligomer
ucucccauucucuuuucuc

SEQ ID NO: 6709 - RNA, 19 nt, artificial
  Oligomer
ugaaaaugaaaugcacucc

SEQ ID NO: 6710 - RNA, 19 nt, artificial
  Oligomer
uguuucaggccugugauca

SEQ ID NO: 6711 - RNA, 19 nt, artificial
  Oligomer
uuucaggccugugaucaca

SEQ ID NO: 6712 - RNA, 19 nt, artificial
  Oligomer
acuuucauaacuuaguugg

SEQ ID NO: 6713 - RNA, 19 nt, artificial
  Oligomer
uaauaugaggcacagcgug

SEQ ID NO: 6714 - RNA, 19 nt, artificial
  Oligomer
uugucuucgaacucuuguu

SEQ ID NO: 6715 - RNA, 19 nt, artificial
  Oligomer
uugagcauuuggcagcaca

SEQ ID NO: 6716 - RNA, 19 nt, artificial
  Oligomer
auccuuagccuguucuuga

SEQ ID NO: 6717 - RNA, 19 nt, artificial
  Oligomer
aucaguauguguauaccuc

SEQ ID NO: 6718 - RNA, 19 nt, artificial
  Oligomer
auauuaugcacagccaaac

SEQ ID NO: 6719 - RNA, 19 nt, artificial
  Oligomer
cuuauuugucagaccuacc

SEQ ID NO: 6720 - RNA, 19 nt, artificial
  Oligomer
uuaauaugaggcacagcgu

SEQ ID NO: 6721 - RNA, 19 nt, artificial
  Oligomer
uguccaguugucuucgaac

SEQ ID NO: 6722 - RNA, 19 nt, artificial
  Oligomer
uacugagaggaaaaaaaug

SEQ ID NO: 6723 - RNA, 19 nt, artificial
  Oligomer
guucuuauuuaguucaucc

SEQ ID NO: 6724 - RNA, 19 nt, artificial
  Oligomer
ucccacuuccauuuugaac

SEQ ID NO: 6725 - RNA, 19 nt, artificial
  Oligomer
uauugacucgggcauucac

SEQ ID NO: 6726 - RNA, 19 nt, artificial
  Oligomer
ucucauaacuggauaacac

SEQ ID NO: 6727 - RNA, 19 nt, artificial
  Oligomer
auaaucuuagggaaguuac

SEQ ID NO: 6728 - RNA, 19 nt, artificial
  Oligomer
cuaucuuggcauugugugg

SEQ ID NO: 6729 - RNA, 19 nt, artificial
  Oligomer
uucacauacaaagccugca

SEQ ID NO: 6730 - RNA, 19 nt, artificial
  Oligomer
auuuauuuccucauggaag

SEQ ID NO: 6731 - RNA, 19 nt, artificial
  Oligomer
ugucaguguaaaagggugc

SEQ ID NO: 6732 - RNA, 19 nt, artificial
  Oligomer
guacaauucguucagcucc

SEQ ID NO: 6733 - RNA, 19 nt, artificial
  Oligomer
uaugcacagccaaacucuc

SEQ ID NO: 6734 - RNA, 19 nt, artificial
  Oligomer
uugggcauuccuuuauuuu

SEQ ID NO: 6735 - RNA, 19 nt, artificial
  Oligomer
uuucacaaacacaauugca

SEQ ID NO: 6736 - RNA, 19 nt, artificial
  Oligomer
ucucagacuccuuauaacu

SEQ ID NO: 6737 - RNA, 19 nt, artificial
  Oligomer
ugaucuggaaaauuuccuu

SEQ ID NO: 6738 - RNA, 19 nt, artificial
  Oligomer
accuccuucaauuauauuc

SEQ ID NO: 6739 - RNA, 19 nt, artificial
  Oligomer
uauucacauacaaagccug

SEQ ID NO: 6740 - RNA, 19 nt, artificial
  Oligomer
uuaugcacauagguuagaa

SEQ ID NO: 6741 - RNA, 19 nt, artificial
  Oligomer
uaucuuagguaguuuccac

SEQ ID NO: 6742 - RNA, 19 nt, artificial
  Oligomer
uuuuauagcacaaggagca

SEQ ID NO: 6743 - RNA, 19 nt, artificial
  Oligomer
aacauuuguggcuccaagg

SEQ ID NO: 6744 - RNA, 19 nt, artificial
  Oligomer
uucuuuauucucuuucgag

SEQ ID NO: 6745 - RNA, 19 nt, artificial
  Oligomer
aaagaagucuuccucaggg

SEQ ID NO: 6746 - RNA, 19 nt, artificial
  Oligomer
aguccaagaaucuuuuccc

SEQ ID NO: 6747 - RNA, 19 nt, artificial
  Oligomer
uugucccacuuccauuuug

SEQ ID NO: 6748 - RNA, 19 nt, artificial
  Oligomer
ucugcccacguacaauucg

SEQ ID NO: 6749 - RNA, 19 nt, artificial
  Oligomer
uucacaaacacaauugcaa

SEQ ID NO: 6750 - RNA, 19 nt, artificial
  Oligomer
uucagcuccauggauggca

SEQ ID NO: 6751 - RNA, 19 nt, artificial
  Oligomer
uuggcauugugugguucua

SEQ ID NO: 6752 - RNA, 19 nt, artificial
  Oligomer
uuuguaaaagugcucucaa

SEQ ID NO: 6753 - RNA, 19 nt, artificial
  Oligomer
uggagaaacacucucggag

SEQ ID NO: 6754 - RNA, 19 nt, artificial
  Oligomer
uccagcuuggacaccuuug

SEQ ID NO: 6755 - RNA, 19 nt, artificial
  Oligomer
uugugugguucuaaauuca

SEQ ID NO: 6756 - RNA, 19 nt, artificial
  Oligomer
uauuuguaccagacugacu

SEQ ID NO: 6757 - RNA, 19 nt, artificial
  Oligomer
auucacacaccauuccaca

SEQ ID NO: 6758 - RNA, 19 nt, artificial
  Oligomer
uaauucuaucuuggcauug

SEQ ID NO: 6759 - RNA, 19 nt, artificial
  Oligomer
ucauucuuagaguaccugu

SEQ ID NO: 6760 - RNA, 19 nt, artificial
  Oligomer
uagaaagggccaauauucu

SEQ ID NO: 6761 - RNA, 19 nt, artificial
  Oligomer
augauggcaaaaaugacac

SEQ ID NO: 6762 - RNA, 19 nt, artificial
  Oligomer
guuccuuuccugcaucugg

SEQ ID NO: 6763 - RNA, 19 nt, artificial
  Oligomer
acuuccacugacauuacug

SEQ ID NO: 6764 - RNA, 19 nt, artificial
  Oligomer
uguaaaagggugccacucc

SEQ ID NO: 6765 - RNA, 19 nt, artificial
  Oligomer
uucuucaucuguagcucga

SEQ ID NO: 6766 - RNA, 19 nt, artificial
  Oligomer
uuuccuccuaaaccagucu

SEQ ID NO: 6767 - RNA, 19 nt, artificial
  Oligomer
uuacccugcuguauuagua

SEQ ID NO: 6768 - RNA, 19 nt, artificial
  Oligomer
uuugaggauucugaggcag

SEQ ID NO: 6769 - RNA, 19 nt, artificial
  Oligomer
uccaaguucagagagugcu

SEQ ID NO: 6770 - RNA, 19 nt, artificial
  Oligomer
cuuggcauugugugguucu

SEQ ID NO: 6771 - RNA, 19 nt, artificial
  Oligomer
auuuagagacucucucuug

SEQ ID NO: 6772 - RNA, 19 nt, artificial
  Oligomer
aacaaaaagaaaacccugc

SEQ ID NO: 6773 - RNA, 19 nt, artificial
  Oligomer
auuauugacucgggcauuc

SEQ ID NO: 6774 - RNA, 19 nt, artificial
  Oligomer
uaucacagccacaagcauu

SEQ ID NO: 6775 - RNA, 19 nt, artificial
  Oligomer
uucuaaaauugaguccaag

SEQ ID NO: 6776 - RNA, 19 nt, artificial
  Oligomer
uccaguugucuucgaacuc

SEQ ID NO: 6777 - RNA, 19 nt, artificial
  Oligomer
uagaaaaccuuggagaaac

SEQ ID NO: 6778 - RNA, 19 nt, artificial
  Oligomer
uagagauuuuuguuucugg

SEQ ID NO: 6779 - RNA, 19 nt, artificial
  Oligomer
auuccuguccaguugucuu

SEQ ID NO: 6780 - RNA, 19 nt, artificial
  Oligomer
auuccuuuaagggaaaacc

SEQ ID NO: 6781 - RNA, 19 nt, artificial
  Oligomer
aagacuucaaaguaagacc

SEQ ID NO: 6782 - RNA, 19 nt, artificial
  Oligomer
aagagaaucagcaugcagu

SEQ ID NO: 6783 - RNA, 19 nt, artificial
  Oligomer
uccaccuccaacccucuuu

SEQ ID NO: 6784 - RNA, 19 nt, artificial
  Oligomer
augugcaauggugugaauc

SEQ ID NO: 6785 - RNA, 19 nt, artificial
  Oligomer
augguuuugguggaggaag

SEQ ID NO: 6786 - RNA, 19 nt, artificial
  Oligomer
aaucuuagggaaguuacug

SEQ ID NO: 6787 - RNA, 19 nt, artificial
  Oligomer
augacaaagaacaacugag

SEQ ID NO: 6788 - RNA, 19 nt, artificial
  Oligomer
ucuucuucaucuguagcuc

SEQ ID NO: 6789 - RNA, 19 nt, artificial
  Oligomer
uuaagggaaaaccauuaca

SEQ ID NO: 6790 - RNA, 19 nt, artificial
  Oligomer
uauuuuauagcacaaggag

SEQ ID NO: 6791 - RNA, 19 nt, artificial
  Oligomer
auagagcuccacauaaaug

SEQ ID NO: 6792 - RNA, 19 nt, artificial
  Oligomer
uaguugguuuugaagauag

SEQ ID NO: 6793 - RNA, 19 nt, artificial
  Oligomer
uuuguaccagacugacuug

SEQ ID NO: 6794 - RNA, 19 nt, artificial
  Oligomer
uucagaacauacuauugag

SEQ ID NO: 6795 - RNA, 19 nt, artificial
  Oligomer
uuuccugcaucuggcucuc

SEQ ID NO: 6796 - RNA, 19 nt, artificial
  Oligomer
uuauugacucgggcauuca

SEQ ID NO: 6797 - RNA, 19 nt, artificial
  Oligomer
uccuugguuuccuucuucu

SEQ ID NO: 6798 - RNA, 19 nt, artificial
  Oligomer
ucuaaaauugaguccaaga

SEQ ID NO: 6799 - RNA, 19 nt, artificial
  Oligomer
uucauaagggcuagcugga

SEQ ID NO: 6800 - RNA, 19 nt, artificial
  Oligomer
cccacuuccauuuugaacc

SEQ ID NO: 6801 - RNA, 19 nt, artificial
  Oligomer
uccuuuuccuccuaaacca

SEQ ID NO: 6802 - RNA, 19 nt, artificial
  Oligomer
uuagguaguuuccacgcau

SEQ ID NO: 6803 - RNA, 19 nt, artificial
  Oligomer
ucccauucucuuuucuccu

SEQ ID NO: 6804 - RNA, 19 nt, artificial
  Oligomer
aauuaugcacauagguuag

SEQ ID NO: 6805 - RNA, 19 nt, artificial
  Oligomer
uggcauugugugguucuaa

SEQ ID NO: 6806 - RNA, 19 nt, artificial
  Oligomer
ucucucuacuuucauaacu

SEQ ID NO: 6807 - RNA, 19 nt, artificial
  Oligomer
uguuuguaaaagugcucuc

SEQ ID NO: 6808 - RNA, 19 nt, artificial
  Oligomer
augcgauccauuuugugug

SEQ ID NO: 6809 - RNA, 19 nt, artificial
  Oligomer
cucuuuucuccuuauuucc

SEQ ID NO: 6810 - RNA, 19 nt, artificial
  Oligomer
ugagaauggaugcgaaggg

SEQ ID NO: 6811 - RNA, 19 nt, artificial
  Oligomer
uagaugagccagagucaug

SEQ ID NO: 6812 - RNA, 19 nt, artificial
  Oligomer
auguuuguaaaagugcucu

SEQ ID NO: 6813 - RNA, 19 nt, artificial
  Oligomer
uauaacugagguacccucu

SEQ ID NO: 6814 - RNA, 19 nt, artificial
  Oligomer
uagaauuaucucccagguc

SEQ ID NO: 6815 - RNA, 19 nt, artificial
  Oligomer
uucucagacuccuuauaac

SEQ ID NO: 6816 - RNA, 19 nt, artificial
  Oligomer
uucagauugguggcguuau

SEQ ID NO: 6817 - RNA, 19 nt, artificial
  Oligomer
acauuaacuccaaucaauc

SEQ ID NO: 6818 - RNA, 19 nt, artificial
  Oligomer
uccuauucugguauuaggg

SEQ ID NO: 6819 - RNA, 19 nt, artificial
  Oligomer
ucaaaggcauguguguccc

SEQ ID NO: 6820 - RNA, 19 nt, artificial
  Oligomer
ucucucacucucccauucu

SEQ ID NO: 6821 - RNA, 19 nt, artificial
  Oligomer
uacaauucguucagcucca

SEQ ID NO: 6822 - RNA, 19 nt, artificial
  Oligomer
guauuaguaaacuggagua

SEQ ID NO: 6823 - RNA, 19 nt, artificial
  Oligomer
auuguuccuuuccugcauc

SEQ ID NO: 6824 - RNA, 19 nt, artificial
  Oligomer
agaacuaagaaaaaccuuc

SEQ ID NO: 6825 - RNA, 19 nt, artificial
  Oligomer
ugaaccuuuugauccuuuc

SEQ ID NO: 6826 - RNA, 19 nt, artificial
  Oligomer
cuuagccuguucuugaccc

SEQ ID NO: 6827 - RNA, 19 nt, artificial
  Oligomer
ugaaacuccugcuuaucac

SEQ ID NO: 6828 - RNA, 19 nt, artificial
  Oligomer
uuauaaugacaagcacucu

SEQ ID NO: 6829 - RNA, 19 nt, artificial
  Oligomer
augacaagcacucuuauau

SEQ ID NO: 6830 - RNA, 19 nt, artificial
  Oligomer
uguuuacucaggguuucag

SEQ ID NO: 6831 - RNA, 19 nt, artificial
  Oligomer
auuuucucucacucuccca

SEQ ID NO: 6832 - RNA, 19 nt, artificial
  Oligomer
uuuccaagucauaggaggg

SEQ ID NO: 6833 - RNA, 19 nt, artificial
  Oligomer
aucuguagcucgaugguuu

SEQ ID NO: 6834 - RNA, 19 nt, artificial
  Oligomer
agugauuggccugagacuc

SEQ ID NO: 6835 - RNA, 19 nt, artificial
  Oligomer
ugcucagaugucaauacug

SEQ ID NO: 6836 - RNA, 19 nt, artificial
  Oligomer
uuugagcuucagauuggug

SEQ ID NO: 6837 - RNA, 19 nt, artificial
  Oligomer
aucauaaacccgguaauac

SEQ ID NO: 6838 - RNA, 19 nt, artificial
  Oligomer
uugucagaccuacccucag

SEQ ID NO: 6839 - RNA, 19 nt, artificial
  Oligomer
uagucccuugaauaauccc

SEQ ID NO: 6840 - RNA, 19 nt, artificial
  Oligomer
aguaguaugacaaagaaca

SEQ ID NO: 6841 - RNA, 19 nt, artificial
  Oligomer
auaacugagguacccucuc

SEQ ID NO: 6842 - RNA, 19 nt, artificial
  Oligomer
uuguuuacucaggguuuca

SEQ ID NO: 6843 - RNA, 19 nt, artificial
  Oligomer
aucuuuucccuaacuucca

SEQ ID NO: 6844 - RNA, 19 nt, artificial
  Oligomer
uuguuucaggccugugauc

SEQ ID NO: 6845 - RNA, 19 nt, artificial
  Oligomer
uccuccuaaaccagucuuc

SEQ ID NO: 6846 - RNA, 19 nt, artificial
  Oligomer
uagaaagaacaucuggccc

SEQ ID NO: 6847 - RNA, 19 nt, artificial
  Oligomer
uauuaugcacagccaaacu

SEQ ID NO: 6848 - RNA, 19 nt, artificial
  Oligomer
auucuaucuuggcauugug

SEQ ID NO: 6849 - RNA, 19 nt, artificial
  Oligomer
uccaauauucuucuguaga

SEQ ID NO: 6850 - RNA, 19 nt, artificial
  Oligomer
uggucuaugacaguaauag

SEQ ID NO: 6851 - RNA, 19 nt, artificial
  Oligomer
aucugcaaaccacucaaag

SEQ ID NO: 6852 - RNA, 19 nt, artificial
  Oligomer
ugauuuugaggauucugag

SEQ ID NO: 6853 - RNA, 19 nt, artificial
  Oligomer
augcacagccaaacucucu

SEQ ID NO: 6854 - RNA, 19 nt, artificial
  Oligomer
uuguuccuuuccugcaucu

SEQ ID NO: 6855 - RNA, 19 nt, artificial
  Oligomer
uucgacagacuggcaagag

SEQ ID NO: 6856 - RNA, 19 nt, artificial
  Oligomer
uauauagcuacuccuuggu

SEQ ID NO: 6857 - RNA, 19 nt, artificial
  Oligomer
uguuccuuuccugcaucug

SEQ ID NO: 6858 - RNA, 19 nt, artificial
  Oligomer
auccaugccaccauuuuau

SEQ ID NO: 6859 - RNA, 19 nt, artificial
  Oligomer
ucagaauuauugacucggg

SEQ ID NO: 6860 - RNA, 19 nt, artificial
  Oligomer
uugcaaaagcagaagaacu

SEQ ID NO: 6861 - RNA, 19 nt, artificial
  Oligomer
uaaaagggugccacuccag

SEQ ID NO: 6862 - RNA, 19 nt, artificial
  Oligomer
uuccuccuaaaccagucuu

SEQ ID NO: 6863 - RNA, 19 nt, artificial
  Oligomer
uguauugucccacuuccau

SEQ ID NO: 6864 - RNA, 19 nt, artificial
  Oligomer
agcucuuucuccuucuucc

SEQ ID NO: 6865 - RNA, 19 nt, artificial
  Oligomer
aucauucuuagaguaccug

SEQ ID NO: 6866 - RNA, 19 nt, artificial
  Oligomer
augcacauagguuagaaag

SEQ ID NO: 6867 - RNA, 19 nt, artificial
  Oligomer
ugacucauaguaauaacac

SEQ ID NO: 6868 - RNA, 19 nt, artificial
  Oligomer
uaagaaugugcagaacccu

SEQ ID NO: 6869 - RNA, 19 nt, artificial
  Oligomer
aauaaaccauuagucacac

SEQ ID NO: 6870 - RNA, 19 nt, artificial
  Oligomer
uguugagacacucucaaca

SEQ ID NO: 6871 - RNA, 19 nt, artificial
  Oligomer
cagagauacagaaacaugg

SEQ ID NO: 6872 - RNA, 19 nt, artificial
  Oligomer
uucagguccacagaggaaa

SEQ ID NO: 6873 - RNA, 19 nt, artificial
  Oligomer
uuucccuaacuuccacuga

SEQ ID NO: 6874 - RNA, 19 nt, artificial
  Oligomer
uuauauuaugcacagccaa

SEQ ID NO: 6875 - RNA, 19 nt, artificial
  Oligomer
ucaaauaagaaugugcaga

SEQ ID NO: 6876 - RNA, 19 nt, artificial
  Oligomer
uagaaguuuuccuuguuga

SEQ ID NO: 6877 - RNA, 19 nt, artificial
  Oligomer
uucaggguucuuuauucuc

SEQ ID NO: 6878 - RNA, 19 nt, artificial
  Oligomer
aauucauuaucccaguugg

SEQ ID NO: 6879 - RNA, 19 nt, artificial
  Oligomer
auagcugaacacaucuuca

SEQ ID NO: 6880 - RNA, 19 nt, artificial
  Oligomer
auuugucacaauuccuaag

SEQ ID NO: 6881 - RNA, 19 nt, artificial
  Oligomer
ucuuugacauuccuuuaag

SEQ ID NO: 6882 - RNA, 19 nt, artificial
  Oligomer
uauagcacaaggagcagga

SEQ ID NO: 6883 - RNA, 19 nt, artificial
  Oligomer
uuaguauccuuagccuguu

SEQ ID NO: 6884 - RNA, 19 nt, artificial
  Oligomer
uucgaacucuuguugagca

SEQ ID NO: 6885 - RNA, 19 nt, artificial
  Oligomer
uguuucuggguuguuaauu

SEQ ID NO: 6886 - RNA, 19 nt, artificial
  Oligomer
uucugaggcagcucaguau

SEQ ID NO: 6887 - RNA, 19 nt, artificial
  Oligomer
aacaucuggcccaguuacc

SEQ ID NO: 6888 - RNA, 19 nt, artificial
  Oligomer
auggauacuaaagaagucu

SEQ ID NO: 6889 - RNA, 19 nt, artificial
  Oligomer
acauauuugucacaauucc

SEQ ID NO: 6890 - RNA, 19 nt, artificial
  Oligomer
ugugcaauggugugaaucg

SEQ ID NO: 6891 - RNA, 19 nt, artificial
  Oligomer
cuugguuuccuucuucuuu

SEQ ID NO: 6892 - RNA, 19 nt, artificial
  Oligomer
uguguguaccaaaagacuu

SEQ ID NO: 6893 - RNA, 19 nt, artificial
  Oligomer
uaaugauggcaaaaaugac

SEQ ID NO: 6894 - RNA, 19 nt, artificial
  Oligomer
cacaguuucauaaucuuag

SEQ ID NO: 6895 - RNA, 19 nt, artificial
  Oligomer
caaaccuggaguaagaugg

SEQ ID NO: 6896 - RNA, 19 nt, artificial
  Oligomer
uuagccuguucuugacccu

SEQ ID NO: 6897 - RNA, 19 nt, artificial
  Oligomer
ucguucagcuccauggaug

SEQ ID NO: 6898 - RNA, 19 nt, artificial
  Oligomer
acugauuuugaggauucug

SEQ ID NO: 6899 - RNA, 19 nt, artificial
  Oligomer
auguauugucccacuucca

SEQ ID NO: 6900 - RNA, 19 nt, artificial
  Oligomer
uuuaauaguugagcacagu

SEQ ID NO: 6901 - RNA, 19 nt, artificial
  Oligomer
ucaaaccuggaguaagaug

SEQ ID NO: 6902 - RNA, 19 nt, artificial
  Oligomer
auauucgcacagcaggccu

SEQ ID NO: 6903 - RNA, 19 nt, artificial
  Oligomer
uagaucuuuuugagcuuca

SEQ ID NO: 6904 - RNA, 19 nt, artificial
  Oligomer
aguaugacaaagaacaacu

SEQ ID NO: 6905 - RNA, 19 nt, artificial
  Oligomer
aauguuuguaaaagugcuc

SEQ ID NO: 6906 - RNA, 19 nt, artificial
  Oligomer
uuaccgaaguugaagaguu

SEQ ID NO: 6907 - RNA, 19 nt, artificial
  Oligomer
uguccauuuuuaagcaggg

SEQ ID NO: 6908 - RNA, 19 nt, artificial
  Oligomer
uagguaguuuccacgcauc

SEQ ID NO: 6909 - RNA, 19 nt, artificial
  Oligomer
ucaauauucauaagggcua

SEQ ID NO: 6910 - RNA, 19 nt, artificial
  Oligomer
uaguaugacaaagaacaac

SEQ ID NO: 6911 - RNA, 19 nt, artificial
  Oligomer
aaaaagaaaacccugcucu

SEQ ID NO: 6912 - RNA, 19 nt, artificial
  Oligomer
aaugauggcaaaaaugaca

SEQ ID NO: 6913 - RNA, 19 nt, artificial
  Oligomer
aaacauuuguggcuccaag

SEQ ID NO: 6914 - RNA, 19 nt, artificial
  Oligomer
uucugguauuaggguguug

SEQ ID NO: 6915 - RNA, 19 nt, artificial
  Oligomer
uaguaaacuggaguaugcu

SEQ ID NO: 6916 - RNA, 19 nt, artificial
  Oligomer
uuggacaccuuugggcacu

SEQ ID NO: 6917 - RNA, 19 nt, artificial
  Oligomer
agaacaaaaagaaaacccu

SEQ ID NO: 6918 - RNA, 19 nt, artificial
  Oligomer
ucuuuucccuaacuuccac

SEQ ID NO: 6919 - RNA, 19 nt, artificial
  Oligomer
auagaugaauugauaccug

SEQ ID NO: 6920 - RNA, 19 nt, artificial
  Oligomer
cugcaaaccacucaaaggc

SEQ ID NO: 6921 - RNA, 19 nt, artificial
  Oligomer
ucacacaccauuccacauu

SEQ ID NO: 6922 - RNA, 19 nt, artificial
  Oligomer
uucauaaucuuagggaagu

SEQ ID NO: 6923 - RNA, 19 nt, artificial
  Oligomer
acaaguuagaaguuuuccu

SEQ ID NO: 6924 - RNA, 19 nt, artificial
  Oligomer
ucacucucccauucucuuu

SEQ ID NO: 6925 - RNA, 19 nt, artificial
  Oligomer
aggagguuaauucuccacc

SEQ ID NO: 6926 - RNA, 19 nt, artificial
  Oligomer
ugaguauuacauuaacucc

SEQ ID NO: 6927 - RNA, 19 nt, artificial
  Oligomer
gucuugaauucauuauccc

SEQ ID NO: 6928 - RNA, 19 nt, artificial
  Oligomer
ucaggguucuuuauucucu

SEQ ID NO: 6929 - RNA, 19 nt, artificial
  Oligomer
aauagaugugcaauggugu

SEQ ID NO: 6930 - RNA, 19 nt, artificial
  Oligomer
auugguuaguauccuuagc

SEQ ID NO: 6931 - RNA, 19 nt, artificial
  Oligomer
uuucuccuucuuccucauu

SEQ ID NO: 6932 - RNA, 19 nt, artificial
  Oligomer
uugauccuuucccuuuuga

SEQ ID NO: 6933 - RNA, 19 nt, artificial
  Oligomer
auacuaaagaagucuuccu

SEQ ID NO: 6934 - RNA, 19 nt, artificial
  Oligomer
uauauuaugcacagccaaa

SEQ ID NO: 6935 - RNA, 19 nt, artificial
  Oligomer
uccaagaaucuuuucccua

SEQ ID NO: 6936 - RNA, 19 nt, artificial
  Oligomer
aaguuagaaguuuuccuug

SEQ ID NO: 6937 - RNA, 19 nt, artificial
  Oligomer
uucaaauaagaaugugcag

SEQ ID NO: 6938 - RNA, 19 nt, artificial
  Oligomer
gaucuggaaaauuuccuuc

SEQ ID NO: 6939 - RNA, 19 nt, artificial
  Oligomer
ugugaauuugaucucugua

SEQ ID NO: 6940 - RNA, 19 nt, artificial
  Oligomer
uagauguuguagcugagga

SEQ ID NO: 6941 - RNA, 19 nt, artificial
  Oligomer
auagcuacuccuugguuuc

SEQ ID NO: 6942 - RNA, 19 nt, artificial
  Oligomer
uugagcacaguuuuaagaa

SEQ ID NO: 6943 - RNA, 19 nt, artificial
  Oligomer
aacaugggacccacuaucc

SEQ ID NO: 6944 - RNA, 19 nt, artificial
  Oligomer
aaggacagcagauuucgac

SEQ ID NO: 6945 - RNA, 19 nt, artificial
  Oligomer
uucagccaaggcuucaggu

SEQ ID NO: 6946 - RNA, 19 nt, artificial
  Oligomer
uagcacaaggagcaggacu

SEQ ID NO: 6947 - RNA, 19 nt, artificial
  Oligomer
agaaauauauagcuacucc

SEQ ID NO: 6948 - RNA, 19 nt, artificial
  Oligomer
ucgcacagcaggccuuauu

SEQ ID NO: 6949 - RNA, 19 nt, artificial
  Oligomer
uguaaaagugcucucaaaa

SEQ ID NO: 6950 - RNA, 19 nt, artificial
  Oligomer
uaguuuccacgcaucuuga

SEQ ID NO: 6951 - RNA, 19 nt, artificial
  Oligomer
uuaguucauccuagucccu

SEQ ID NO: 6952 - RNA, 19 nt, artificial
  Oligomer
uuuguccauuuuuaagcag

SEQ ID NO: 6953 - RNA, 19 nt, artificial
  Oligomer
cugauuuugaggauucuga

SEQ ID NO: 6954 - RNA, 19 nt, artificial
  Oligomer
uagccuguucuugacccua

SEQ ID NO: 6955 - RNA, 19 nt, artificial
  Oligomer
acuucaaaguaagaccucc

SEQ ID NO: 6956 - RNA, 19 nt, artificial
  Oligomer
auaacuggauaacacaggg

SEQ ID NO: 6957 - RNA, 19 nt, artificial
  Oligomer
auaaguguugagacacucu

SEQ ID NO: 6958 - RNA, 19 nt, artificial
  Oligomer
augcuaaauacuaagugcu

SEQ ID NO: 6959 - RNA, 19 nt, artificial
  Oligomer
uaguaguaugacaaagaac

SEQ ID NO: 6960 - RNA, 19 nt, artificial
  Oligomer
auauucauaagggcuagcu

SEQ ID NO: 6961 - RNA, 19 nt, artificial
  Oligomer
ugguauuaggguguugacu

SEQ ID NO: 6962 - RNA, 19 nt, artificial
  Oligomer
uuuuuguuucuggguuguu

SEQ ID NO: 6963 - RNA, 19 nt, artificial
  Oligomer
cuuggagaaacacucucgg

SEQ ID NO: 6964 - RNA, 19 nt, artificial
  Oligomer
aaucccugcucccacuaac

SEQ ID NO: 6965 - RNA, 19 nt, artificial
  Oligomer
cucuaagcagaaaccaucc

SEQ ID NO: 6966 - RNA, 19 nt, artificial
  Oligomer
uguucuugacccuagggag

SEQ ID NO: 6967 - RNA, 19 nt, artificial
  Oligomer
uuacucaggguuucagcca

SEQ ID NO: 6968 - RNA, 19 nt, artificial
  Oligomer
uuugguggaggaagugaua

SEQ ID NO: 6969 - RNA, 19 nt, artificial
  Oligomer
uacaaagccugcaaguauu

SEQ ID NO: 6970 - RNA, 19 nt, artificial
  Oligomer
auucugaggcagcucagua

SEQ ID NO: 6971 - RNA, 19 nt, artificial
  Oligomer
cuugaguauccgcucucug

SEQ ID NO: 6972 - RNA, 19 nt, artificial
  Oligomer
agcagauuucgacagacug

SEQ ID NO: 6973 - RNA, 19 nt, artificial
  Oligomer
cucucuugaacauauauuc

SEQ ID NO: 6974 - RNA, 19 nt, artificial
  Oligomer
augaaaggugagauuccug

SEQ ID NO: 6975 - RNA, 19 nt, artificial
  Oligomer
aguucauccuagucccuug

SEQ ID NO: 6976 - RNA, 19 nt, artificial
  Oligomer
ucuccuucuuccucauuac

SEQ ID NO: 6977 - RNA, 19 nt, artificial
  Oligomer
auacagaaacaugggaccc

SEQ ID NO: 6978 - RNA, 19 nt, artificial
  Oligomer
uaugcacauagguuagaaa

SEQ ID NO: 6979 - RNA, 19 nt, artificial
  Oligomer
uacagaaacaugggaccca

SEQ ID NO: 6980 - RNA, 19 nt, artificial
  Oligomer
uauggauacuaaagaaguc

SEQ ID NO: 6981 - RNA, 19 nt, artificial
  Oligomer
uggagaugcuuuguuuacu

SEQ ID NO: 6982 - RNA, 19 nt, artificial
  Oligomer
uaacuggauaacacagggc

SEQ ID NO: 6983 - RNA, 19 nt, artificial
  Oligomer
gugagguagauguuguagc

SEQ ID NO: 6984 - RNA, 19 nt, artificial
  Oligomer
guuuacucaggguuucagc

SEQ ID NO: 6985 - RNA, 19 nt, artificial
  Oligomer
cuuauuuccuuuuccuccu

SEQ ID NO: 6986 - RNA, 19 nt, artificial
  Oligomer
cuauauucgcacagcaggc

SEQ ID NO: 6987 - RNA, 19 nt, artificial
  Oligomer
acuaacaucaccaccucau

SEQ ID NO: 6988 - RNA, 19 nt, artificial
  Oligomer
uuucgacagacuggcaaga

SEQ ID NO: 6989 - RNA, 19 nt, artificial
  Oligomer
aaacuuuaagaaaucuggg

SEQ ID NO: 6990 - RNA, 19 nt, artificial
  Oligomer
agugucucuaagcagaaac

SEQ ID NO: 6991 - RNA, 19 nt, artificial
  Oligomer
auuuggcagcacaacccac

SEQ ID NO: 6992 - RNA, 19 nt, artificial
  Oligomer
aaagugauuggccugagac

SEQ ID NO: 6993 - RNA, 19 nt, artificial
  Oligomer
aaaauugaguccaagaauc

SEQ ID NO: 6994 - RNA, 19 nt, artificial
  Oligomer
uuccuuuaagggaaaacca

SEQ ID NO: 6995 - RNA, 19 nt, artificial
  Oligomer
agcauuuggcagcacaacc

SEQ ID NO: 6996 - RNA, 19 nt, artificial
  Oligomer
cuuucauuuugccugucuc

SEQ ID NO: 6997 - RNA, 19 nt, artificial
  Oligomer
uggguuguuaauuuuagga

SEQ ID NO: 6998 - RNA, 19 nt, artificial
  Oligomer
ugugaccagauuuuaaaag

SEQ ID NO: 6999 - RNA, 19 nt, artificial
  Oligomer
cuuuuugagcuucagauug

SEQ ID NO: 7000 - RNA, 19 nt, artificial
  Oligomer
aagaaugugcagaacccuu

SEQ ID NO: 7001 - RNA, 19 nt, artificial
  Oligomer
uacugaauaaggaucagaa

SEQ ID NO: 7002 - RNA, 19 nt, artificial
  Oligomer
ugguguaaagaauugaaac

SEQ ID NO: 7003 - RNA, 19 nt, artificial
  Oligomer
aaacuccugcuuaucacag

SEQ ID NO: 7004 - RNA, 19 nt, artificial
  Oligomer
ucuaaacauuuguggcucc

SEQ ID NO: 7005 - RNA, 19 nt, artificial
  Oligomer
ugagugaccaccuugguga

SEQ ID NO: 7006 - RNA, 19 nt, artificial
  Oligomer
gaauauugacccagacaau

SEQ ID NO: 7007 - RNA, 19 nt, artificial
  Oligomer
cccagacaauuauacaaau

SEQ ID NO: 7008 - RNA, 19 nt, artificial
  Oligomer
aacccaacaccacccuaaa

SEQ ID NO: 7009 - RNA, 19 nt, artificial
  Oligomer
ccaacaccacccuaaacca

SEQ ID NO: 7010 - RNA, 19 nt, artificial
  Oligomer
gacccagacaauuauacaa

SEQ ID NO: 7011 - RNA, 19 nt, artificial
  Oligomer
agaauauugacccagacaa

SEQ ID NO: 7012 - RNA, 19 nt, artificial
  Oligomer
auucaguacucgaucucaa

SEQ ID NO: 7013 - RNA, 19 nt, artificial
  Oligomer
ugacccagacaauuauaca

SEQ ID NO: 7014 - RNA, 19 nt, artificial
  Oligomer
caguuuugguccuacuaaa

SEQ ID NO: 7015 - RNA, 19 nt, artificial
  Oligomer
acccagacaauuauacaaa

SEQ ID NO: 7016 - RNA, 19 nt, artificial
  Oligomer
uucaguacucgaucucaau

SEQ ID NO: 7017 - RNA, 19 nt, artificial
  Oligomer
ugaacccaacaccacccua

SEQ ID NO: 7018 - RNA, 19 nt, artificial
  Oligomer
gggagaauauugacccaga

SEQ ID NO: 7019 - RNA, 19 nt, artificial
  Oligomer
ccagauauucaguacucga

SEQ ID NO: 7020 - RNA, 19 nt, artificial
  Oligomer
gcuacaaaagaaacucaaa

SEQ ID NO: 7021 - RNA, 19 nt, artificial
  Oligomer
auugacccagacaauuaua

SEQ ID NO: 7022 - RNA, 19 nt, artificial
  Oligomer
caagaagcuacaaaagaaa

SEQ ID NO: 7023 - RNA, 19 nt, artificial
  Oligomer
auauugacccagacaauua

SEQ ID NO: 7024 - RNA, 19 nt, artificial
  Oligomer
ggaacuggagugaucucaa

SEQ ID NO: 7025 - RNA, 19 nt, artificial
  Oligomer
ccuggugucuacaugagaa

SEQ ID NO: 7026 - RNA, 19 nt, artificial
  Oligomer
uauugacccagacaauuau

SEQ ID NO: 7027 - RNA, 19 nt, artificial
  Oligomer
ggaguuggaggacaacaua

SEQ ID NO: 7028 - RNA, 19 nt, artificial
  Oligomer
gcugcuguuuaguucugaa

SEQ ID NO: 7029 - RNA, 19 nt, artificial
  Oligomer
gagggcaccaggaaacaaa

SEQ ID NO: 7030 - RNA, 19 nt, artificial
  Oligomer
ugaugugauuucuaccaaa

SEQ ID NO: 7031 - RNA, 19 nt, artificial
  Oligomer
agguggaaaugguauuaga

SEQ ID NO: 7032 - RNA, 19 nt, artificial
  Oligomer
caagaaguagagcacagaa

SEQ ID NO: 7033 - RNA, 19 nt, artificial
  Oligomer
uauucaguacucgaucuca

SEQ ID NO: 7034 - RNA, 19 nt, artificial
  Oligomer
gguggagguggaaauggua

SEQ ID NO: 7035 - RNA, 19 nt, artificial
  Oligomer
gaagaagagguuuggcaaa

SEQ ID NO: 7036 - RNA, 19 nt, artificial
  Oligomer
aguagagcacagaagcaaa

SEQ ID NO: 7037 - RNA, 19 nt, artificial
  Oligomer
acaucugaacccaacacca

SEQ ID NO: 7038 - RNA, 19 nt, artificial
  Oligomer
gaaugaccaagaauguaga

SEQ ID NO: 7039 - RNA, 19 nt, artificial
  Oligomer
cccacuucaugcaccacua

SEQ ID NO: 7040 - RNA, 19 nt, artificial
  Oligomer
aggagacuauguucuacaa

SEQ ID NO: 7041 - RNA, 19 nt, artificial
  Oligomer
agauauucaguacucgauc

SEQ ID NO: 7042 - RNA, 19 nt, artificial
  Oligomer
ggugaaggcaagaaguaga

SEQ ID NO: 7043 - RNA, 19 nt, artificial
  Oligomer
ucaguacucgaucucaauu

SEQ ID NO: 7044 - RNA, 19 nt, artificial
  Oligomer
ccuucaucgagaucuccaa

SEQ ID NO: 7045 - RNA, 19 nt, artificial
  Oligomer
guuuaguucugaagaggaa

SEQ ID NO: 7046 - RNA, 19 nt, artificial
  Oligomer
caacaccacccuaaaccac

SEQ ID NO: 7047 - RNA, 19 nt, artificial
  Oligomer
caaucaggacgcacucuca

SEQ ID NO: 7048 - RNA, 19 nt, artificial
  Oligomer
gaggcuuccuagcccaaaa

SEQ ID NO: 7049 - RNA, 19 nt, artificial
  Oligomer
agaagacaucugaacccaa

SEQ ID NO: 7050 - RNA, 19 nt, artificial
  Oligomer
cuaauugacuuccacaaaa

SEQ ID NO: 7051 - RNA, 19 nt, artificial
  Oligomer
ugaagaagagguuuggcaa

SEQ ID NO: 7052 - RNA, 19 nt, artificial
  Oligomer
cuggaagagugagggugaa

SEQ ID NO: 7053 - RNA, 19 nt, artificial
  Oligomer
agaagagguuuggcaaaaa

SEQ ID NO: 7054 - RNA, 19 nt, artificial
  Oligomer
gagaauauugacccagaca

SEQ ID NO: 7055 - RNA, 19 nt, artificial
  Oligomer
cagucaaugucuacaucuu

SEQ ID NO: 7056 - RNA, 19 nt, artificial
  Oligomer
cuaaaaagcugagcuguaa

SEQ ID NO: 7057 - RNA, 19 nt, artificial
  Oligomer
guaugaccuggaugagaau

SEQ ID NO: 7058 - RNA, 19 nt, artificial
  Oligomer
ggagauugaagacauccga

SEQ ID NO: 7059 - RNA, 19 nt, artificial
  Oligomer
ccaggucaagacauagaau

SEQ ID NO: 7060 - RNA, 19 nt, artificial
  Oligomer
cggaguuggaggacaacau

SEQ ID NO: 7061 - RNA, 19 nt, artificial
  Oligomer
cagauauucaguacucgau

SEQ ID NO: 7062 - RNA, 19 nt, artificial
  Oligomer
ccugguggucuucaugaaa

SEQ ID NO: 7063 - RNA, 19 nt, artificial
  Oligomer
ccaacaacugccuguccaa

SEQ ID NO: 7064 - RNA, 19 nt, artificial
  Oligomer
caucgggcucuuuccuaaa

SEQ ID NO: 7065 - RNA, 19 nt, artificial
  Oligomer
uccggaagguccugaacaa

SEQ ID NO: 7066 - RNA, 19 nt, artificial
  Oligomer
uggagaucagcguggugaa

SEQ ID NO: 7067 - RNA, 19 nt, artificial
  Oligomer
cucaggugcuggacaucaa

SEQ ID NO: 7068 - RNA, 19 nt, artificial
  Oligomer
acccaacaccacccuaaac

SEQ ID NO: 7069 - RNA, 19 nt, artificial
  Oligomer
gucaaugucuacaucuucu

SEQ ID NO: 7070 - RNA, 19 nt, artificial
  Oligomer
ccugaacaaggguuuucaa

SEQ ID NO: 7071 - RNA, 19 nt, artificial
  Oligomer
aacacaagaagcuacaaaa

SEQ ID NO: 7072 - RNA, 19 nt, artificial
  Oligomer
gcagccaaaugcuguguaa

SEQ ID NO: 7073 - RNA, 19 nt, artificial
  Oligomer
ccuaaaaagcugagcugua

SEQ ID NO: 7074 - RNA, 19 nt, artificial
  Oligomer
aagagagcgugaagaagga

SEQ ID NO: 7075 - RNA, 19 nt, artificial
  Oligomer
gggaggauuuucacuucau

SEQ ID NO: 7076 - RNA, 19 nt, artificial
  Oligomer
ccuucauguucucuuauau

SEQ ID NO: 7077 - RNA, 19 nt, artificial
  Oligomer
accucauccuguccaacaa

SEQ ID NO: 7078 - RNA, 19 nt, artificial
  Oligomer
gaggugaaaagguacaaua

SEQ ID NO: 7079 - RNA, 19 nt, artificial
  Oligomer
ugaagaaggaagcagccaa

SEQ ID NO: 7080 - RNA, 19 nt, artificial
  Oligomer
gguugaagaucugagggau

SEQ ID NO: 7081 - RNA, 19 nt, artificial
  Oligomer
cccuggugucuacaugaga

SEQ ID NO: 7082 - RNA, 19 nt, artificial
  Oligomer
uuaggaaggcugugacaaa

SEQ ID NO: 7083 - RNA, 19 nt, artificial
  Oligomer
ccacuaugagaacuucuga

SEQ ID NO: 7084 - RNA, 19 nt, artificial
  Oligomer
ggcugagaaucuccucaga

SEQ ID NO: 7085 - RNA, 19 nt, artificial
  Oligomer
ugcagugcaugaugauuau

SEQ ID NO: 7086 - RNA, 19 nt, artificial
  Oligomer
ccgagaacacaagaagcua

SEQ ID NO: 7087 - RNA, 19 nt, artificial
  Oligomer
agacuuuccucaaccgcua

SEQ ID NO: 7088 - RNA, 19 nt, artificial
  Oligomer
gacaaguguggaggugaaa

SEQ ID NO: 7089 - RNA, 19 nt, artificial
  Oligomer
ugaccuaccugcaauucca

SEQ ID NO: 7090 - RNA, 19 nt, artificial
  Oligomer
ccaacgucuuugugaauga

SEQ ID NO: 7091 - RNA, 19 nt, artificial
  Oligomer
uggugucugugcacauuua

SEQ ID NO: 7092 - RNA, 19 nt, artificial
  Oligomer
agucaaugucuacaucuuc

SEQ ID NO: 7093 - RNA, 19 nt, artificial
  Oligomer
gagggugaaggcaagaagu

SEQ ID NO: 7094 - RNA, 19 nt, artificial
  Oligomer
gcaagaaguagagcacaga

SEQ ID NO: 7095 - RNA, 19 nt, artificial
  Oligomer
ccaucaggaguggcauaaa

SEQ ID NO: 7096 - RNA, 19 nt, artificial
  Oligomer
ugucaaagguggaggugga

SEQ ID NO: 7097 - RNA, 19 nt, artificial
  Oligomer
gauugaagacauccgaaau

SEQ ID NO: 7098 - RNA, 19 nt, artificial
  Oligomer
guauuugcuuggacugaca

SEQ ID NO: 7099 - RNA, 19 nt, artificial
  Oligomer
ggagaauauugacccagac

SEQ ID NO: 7100 - RNA, 19 nt, artificial
  Oligomer
cuggugucuacaugagaaa

SEQ ID NO: 7101 - RNA, 19 nt, artificial
  Oligomer
ccaucagaauccaccuuag

SEQ ID NO: 7102 - RNA, 19 nt, artificial
  Oligomer
cagugcaugaugauuauaa

SEQ ID NO: 7103 - RNA, 19 nt, artificial
  Oligomer
ccaucaucauccagcugcu

SEQ ID NO: 7104 - RNA, 19 nt, artificial
  Oligomer
ugaccaagaauguagagaa

SEQ ID NO: 7105 - RNA, 19 nt, artificial
  Oligomer
acaagcgcuucguggagaa

SEQ ID NO: 7106 - RNA, 19 nt, artificial
  Oligomer
gccacgcagucaaugucua

SEQ ID NO: 7107 - RNA, 19 nt, artificial
  Oligomer
gccgcaaccucauaaccuu

SEQ ID NO: 7108 - RNA, 19 nt, artificial
  Oligomer
aggaaagaagacaucugaa

SEQ ID NO: 7109 - RNA, 19 nt, artificial
  Oligomer
cagaaagugcugaaccgga

SEQ ID NO: 7110 - RNA, 19 nt, artificial
  Oligomer
caagagccaggcugaaaca

SEQ ID NO: 7111 - RNA, 19 nt, artificial
  Oligomer
ugcugcucaagaucccuaa

SEQ ID NO: 7112 - RNA, 19 nt, artificial
  Oligomer
cgcuaugacggcugguuua

SEQ ID NO: 7113 - RNA, 19 nt, artificial
  Oligomer
ggaggugaaaagguacaau

SEQ ID NO: 7114 - RNA, 19 nt, artificial
  Oligomer
gagugaucucaacccuaau

SEQ ID NO: 7115 - RNA, 19 nt, artificial
  Oligomer
gaaggagcuauuuaggaag

SEQ ID NO: 7116 - RNA, 19 nt, artificial
  Oligomer
ccuagaagcaaccacugau

SEQ ID NO: 7117 - RNA, 19 nt, artificial
  Oligomer
cccaaaagcugcagcagua

SEQ ID NO: 7118 - RNA, 19 nt, artificial
  Oligomer
ggagcagucccaucaucau

SEQ ID NO: 7119 - RNA, 19 nt, artificial
  Oligomer
gggcaccaggaaacaaaga

SEQ ID NO: 7120 - RNA, 19 nt, artificial
  Oligomer
agagugagggugaaggcaa

SEQ ID NO: 7121 - RNA, 19 nt, artificial
  Oligomer
aguacucgaucucaauucc

SEQ ID NO: 7122 - RNA, 19 nt, artificial
  Oligomer
agcuauuuaggaaggcugu

SEQ ID NO: 7123 - RNA, 19 nt, artificial
  Oligomer
ggguuuucaaagcucccaa

SEQ ID NO: 7124 - RNA, 19 nt, artificial
  Oligomer
caaaagaaacucaaagaga

SEQ ID NO: 7125 - RNA, 19 nt, artificial
  Oligomer
ggagcuauuuaggaaggcu

SEQ ID NO: 7126 - RNA, 19 nt, artificial
  Oligomer
aauauugacccagacaauu

SEQ ID NO: 7127 - RNA, 19 nt, artificial
  Oligomer
caaccuaagcagcucacaa

SEQ ID NO: 7128 - RNA, 19 nt, artificial
  Oligomer
gagguuuggcaaaaaggca

SEQ ID NO: 7129 - RNA, 19 nt, artificial
  Oligomer
uaaaaagcugagcuguaaa

SEQ ID NO: 7130 - RNA, 19 nt, artificial
  Oligomer
aaguccaccuguuuaucaa

SEQ ID NO: 7131 - RNA, 19 nt, artificial
  Oligomer
ccuuugccuccauccucaa

SEQ ID NO: 7132 - RNA, 19 nt, artificial
  Oligomer
gacugugcuugacuucuuu

SEQ ID NO: 7133 - RNA, 19 nt, artificial
  Oligomer
ucaaccucauccuguccaa

SEQ ID NO: 7134 - RNA, 19 nt, artificial
  Oligomer
ccgcuaugugccuuuugau

SEQ ID NO: 7135 - RNA, 19 nt, artificial
  Oligomer
gagaaaugccagcugucau

SEQ ID NO: 7136 - RNA, 19 nt, artificial
  Oligomer
agugcaugaugauuauaag

SEQ ID NO: 7137 - RNA, 19 nt, artificial
  Oligomer
cucucagggucugcaacaa

SEQ ID NO: 7138 - RNA, 19 nt, artificial
  Oligomer
cccaggucaagacauagaa

SEQ ID NO: 7139 - RNA, 19 nt, artificial
  Oligomer
caguacucgaucucaauuc

SEQ ID NO: 7140 - RNA, 19 nt, artificial
  Oligomer
ggugaaaagguacaauagu

SEQ ID NO: 7141 - RNA, 19 nt, artificial
  Oligomer
ccuucgagcccuucuucaa

SEQ ID NO: 7142 - RNA, 19 nt, artificial
  Oligomer
caauagugcuugucuccga

SEQ ID NO: 7143 - RNA, 19 nt, artificial
  Oligomer
aaagcugagcuguaaaaua

SEQ ID NO: 7144 - RNA, 19 nt, artificial
  Oligomer
ugguccuacuaaauauacu

SEQ ID NO: 7145 - RNA, 19 nt, artificial
  Oligomer
ggacaacauagugguugaa

SEQ ID NO: 7146 - RNA, 19 nt, artificial
  Oligomer
ggaggauuuucacuucaug

SEQ ID NO: 7147 - RNA, 19 nt, artificial
  Oligomer
gucuaauguuuaccaugua

SEQ ID NO: 7148 - RNA, 19 nt, artificial
  Oligomer
gacauuugagggaggagga

SEQ ID NO: 7149 - RNA, 19 nt, artificial
  Oligomer
ucauaaccuuccugcgaga

SEQ ID NO: 7150 - RNA, 19 nt, artificial
  Oligomer
gcaaauucucccguacaga

SEQ ID NO: 7151 - RNA, 19 nt, artificial
  Oligomer
aggaguggcauaaauuuga

SEQ ID NO: 7152 - RNA, 19 nt, artificial
  Oligomer
ugcuguguaagaagaucua

SEQ ID NO: 7153 - RNA, 19 nt, artificial
  Oligomer
ugugcuugacuucuuugaa

SEQ ID NO: 7154 - RNA, 19 nt, artificial
  Oligomer
cauccuguccaacaaccga

SEQ ID NO: 7155 - RNA, 19 nt, artificial
  Oligomer
uuucggaguuggaggacaa

SEQ ID NO: 7156 - RNA, 19 nt, artificial
  Oligomer
ccuugauggaccguuugga

SEQ ID NO: 7157 - RNA, 19 nt, artificial
  Oligomer
agagaaaggugagagugca

SEQ ID NO: 7158 - RNA, 19 nt, artificial
  Oligomer
gcgagaaggagcuauuuag

SEQ ID NO: 7159 - RNA, 19 nt, artificial
  Oligomer
guggaaaugguauuagaga

SEQ ID NO: 7160 - RNA, 19 nt, artificial
  Oligomer
cccugacugugcuugacuu

SEQ ID NO: 7161 - RNA, 19 nt, artificial
  Oligomer
cugagaugagcgagaagga

SEQ ID NO: 7162 - RNA, 19 nt, artificial
  Oligomer
ccuggcaaauucucccgua

SEQ ID NO: 7163 - RNA, 19 nt, artificial
  Oligomer
agaaaaggcaggagacuau

SEQ ID NO: 7164 - RNA, 19 nt, artificial
  Oligomer
cucuaauugacuuccacaa

SEQ ID NO: 7165 - RNA, 19 nt, artificial
  Oligomer
cgaugcguugcuuugguau

SEQ ID NO: 7166 - RNA, 19 nt, artificial
  Oligomer
agaaggaagcagccaaaga

SEQ ID NO: 7167 - RNA, 19 nt, artificial
  Oligomer
acaaguguggaggugaaaa

SEQ ID NO: 7168 - RNA, 19 nt, artificial
  Oligomer
caauugcagugcaugauga

SEQ ID NO: 7169 - RNA, 19 nt, artificial
  Oligomer
gagauugaagacauccgaa

SEQ ID NO: 7170 - RNA, 19 nt, artificial
  Oligomer
acauguuuguggaguccau

SEQ ID NO: 7171 - RNA, 19 nt, artificial
  Oligomer
aggagcagcccuacuucua

SEQ ID NO: 7172 - RNA, 19 nt, artificial
  Oligomer
guguguaucaggcucugga

SEQ ID NO: 7173 - RNA, 19 nt, artificial
  Oligomer
ggaggacaacauagugguu

SEQ ID NO: 7174 - RNA, 19 nt, artificial
  Oligomer
agaggauaagucccgucua

SEQ ID NO: 7175 - RNA, 19 nt, artificial
  Oligomer
agaucgugcuuacuacuau

SEQ ID NO: 7176 - RNA, 19 nt, artificial
  Oligomer
ggauccucuggcugagaau

SEQ ID NO: 7177 - RNA, 19 nt, artificial
  Oligomer
acaccacccuaaaccacag

SEQ ID NO: 7178 - RNA, 19 nt, artificial
  Oligomer
cccagauuucggaguugga

SEQ ID NO: 7179 - RNA, 19 nt, artificial
  Oligomer
caugaugauuauaagucca

SEQ ID NO: 7180 - RNA, 19 nt, artificial
  Oligomer
cagagagaaaggugagagu

SEQ ID NO: 7181 - RNA, 19 nt, artificial
  Oligomer
ugcugccuucccuuaguga

SEQ ID NO: 7182 - RNA, 19 nt, artificial
  Oligomer
cuuauaucuugcucaccau

SEQ ID NO: 7183 - RNA, 19 nt, artificial
  Oligomer
ggcugacaaggauggcaau

SEQ ID NO: 7184 - RNA, 19 nt, artificial
  Oligomer
gagaacacaagaagcuaca

SEQ ID NO: 7185 - RNA, 19 nt, artificial
  Oligomer
gagugaccuaccugcaauu

SEQ ID NO: 7186 - RNA, 19 nt, artificial
  Oligomer
gagaaaaggcaggagacua

SEQ ID NO: 7187 - RNA, 19 nt, artificial
  Oligomer
ccauuguccucgaccaguu

SEQ ID NO: 7188 - RNA, 19 nt, artificial
  Oligomer
ucuccuucauguucucuua

SEQ ID NO: 7189 - RNA, 19 nt, artificial
  Oligomer
ugucgagucucguucauca

SEQ ID NO: 7190 - RNA, 19 nt, artificial
  Oligomer
ccaguuuugguccuacuaa

SEQ ID NO: 7191 - RNA, 19 nt, artificial
  Oligomer
agaacacaagaagcuacaa

SEQ ID NO: 7192 - RNA, 19 nt, artificial
  Oligomer
ucgggcucuuuccuaaaaa

SEQ ID NO: 7193 - RNA, 19 nt, artificial
  Oligomer
gagucugcuucucucugga

SEQ ID NO: 7194 - RNA, 19 nt, artificial
  Oligomer
ucagggucugcaacaacua

SEQ ID NO: 7195 - RNA, 19 nt, artificial
  Oligomer
agggugaaggcaagaagua

SEQ ID NO: 7196 - RNA, 19 nt, artificial
  Oligomer
gguggaaaugguauuagag

SEQ ID NO: 7197 - RNA, 19 nt, artificial
  Oligomer
uguucucucuggcugacaa

SEQ ID NO: 7198 - RNA, 19 nt, artificial
  Oligomer
aacaccacccuaaaccaca

SEQ ID NO: 7199 - RNA, 19 nt, artificial
  Oligomer
cacagaagcaaagauuuua

SEQ ID NO: 7200 - RNA, 19 nt, artificial
  Oligomer
gcuaugacggcugguuuaa

SEQ ID NO: 7201 - RNA, 19 nt, artificial
  Oligomer
ugcuuggacugacauuuga

SEQ ID NO: 7202 - RNA, 19 nt, artificial
  Oligomer
agcugagcuguaaaauauu

SEQ ID NO: 7203 - RNA, 19 nt, artificial
  Oligomer
cccaaggcuuugaguacaa

SEQ ID NO: 7204 - RNA, 19 nt, artificial
  Oligomer
cgugcuuacuacuauggcu

SEQ ID NO: 7205 - RNA, 19 nt, artificial
  Oligomer
caaagaagauaaagaccac

SEQ ID NO: 7206 - RNA, 19 nt, artificial
  Oligomer
agccaaagauggagugcca

SEQ ID NO: 7207 - RNA, 19 nt, artificial
  Oligomer
gcagcuaugcucugaucca

SEQ ID NO: 7208 - RNA, 19 nt, artificial
  Oligomer
ccacuucaugcaccacuau

SEQ ID NO: 7209 - RNA, 19 nt, artificial
  Oligomer
cacaagaagcuacaaaaga

SEQ ID NO: 7210 - RNA, 19 nt, artificial
  Oligomer
gggugaaggcaagaaguag

SEQ ID NO: 7211 - RNA, 19 nt, artificial
  Oligomer
ucaggaccaccaugcuaua

SEQ ID NO: 7212 - RNA, 19 nt, artificial
  Oligomer
gcaauggcugugcuggaua

SEQ ID NO: 7213 - RNA, 19 nt, artificial
  Oligomer
acaguacccaggaggugaa

SEQ ID NO: 7214 - RNA, 19 nt, artificial
  Oligomer
caacgucuuugugaaugau

SEQ ID NO: 7215 - RNA, 19 nt, artificial
  Oligomer
agcuggucaccuuacgcaa

SEQ ID NO: 7216 - RNA, 19 nt, artificial
  Oligomer
gcagucccaucaucaucca

SEQ ID NO: 7217 - RNA, 19 nt, artificial
  Oligomer
cacgcagcucugugucaaa

SEQ ID NO: 7218 - RNA, 19 nt, artificial
  Oligomer
uggaaaugguauuagagau

SEQ ID NO: 7219 - RNA, 19 nt, artificial
  Oligomer
agggcaccaggaaacaaag

SEQ ID NO: 7220 - RNA, 19 nt, artificial
  Oligomer
augucuacaucuucucagu

SEQ ID NO: 7221 - RNA, 19 nt, artificial
  Oligomer
agcgcuucguggagaacua

SEQ ID NO: 7222 - RNA, 19 nt, artificial
  Oligomer
acaacuacuggauucggga

SEQ ID NO: 7223 - RNA, 19 nt, artificial
  Oligomer
guguuggcguguuugcaga

SEQ ID NO: 7224 - RNA, 19 nt, artificial
  Oligomer
cuugaugucaccagugaua

SEQ ID NO: 7225 - RNA, 19 nt, artificial
  Oligomer
aaaaagcugagcuguaaaa

SEQ ID NO: 7226 - RNA, 19 nt, artificial
  Oligomer
cagcccugauauucuugau

SEQ ID NO: 7227 - RNA, 19 nt, artificial
  Oligomer
ggaguggcauaaauuugag

SEQ ID NO: 7228 - RNA, 19 nt, artificial
  Oligomer
acaacauagugguugaaga

SEQ ID NO: 7229 - RNA, 19 nt, artificial
  Oligomer
ccaugaugcgauccuucau

SEQ ID NO: 7230 - RNA, 19 nt, artificial
  Oligomer
ugcccacuuuccacaucua

SEQ ID NO: 7231 - RNA, 19 nt, artificial
  Oligomer
caggaaugaccaagaaugu

SEQ ID NO: 7232 - RNA, 19 nt, artificial
  Oligomer
ucuaauugacuuccacaaa

SEQ ID NO: 7233 - RNA, 19 nt, artificial
  Oligomer
gcagaagcugugaugcuua

SEQ ID NO: 7234 - RNA, 19 nt, artificial
  Oligomer
ggagacuauguucuacaau

SEQ ID NO: 7235 - RNA, 19 nt, artificial
  Oligomer
ggcuguucuccaagaagga

SEQ ID NO: 7236 - RNA, 19 nt, artificial
  Oligomer
agaggagcagucccaucau

SEQ ID NO: 7237 - RNA, 19 nt, artificial
  Oligomer
cccagcuuccugcagaaaa

SEQ ID NO: 7238 - RNA, 19 nt, artificial
  Oligomer
ugacaugggaggauuuuca

SEQ ID NO: 7239 - RNA, 19 nt, artificial
  Oligomer
aggagugaccuaccugcaa

SEQ ID NO: 7240 - RNA, 19 nt, artificial
  Oligomer
gagcgugaagaaggaagca

SEQ ID NO: 7241 - RNA, 19 nt, artificial
  Oligomer
caggaucucccaaagaaga

SEQ ID NO: 7242 - RNA, 19 nt, artificial
  Oligomer
gguccuggccaucauguau

SEQ ID NO: 7243 - RNA, 19 nt, artificial
  Oligomer
ugcucaagaucccuaagga

SEQ ID NO: 7244 - RNA, 19 nt, artificial
  Oligomer
guuugagaacaccaggaau

SEQ ID NO: 7245 - RNA, 19 nt, artificial
  Oligomer
gaagagguuuggcaaaaag

SEQ ID NO: 7246 - RNA, 19 nt, artificial
  Oligomer
acgaauucuucaccaugau

SEQ ID NO: 7247 - RNA, 19 nt, artificial
  Oligomer
aagcucucagggucugcaa

SEQ ID NO: 7248 - RNA, 19 nt, artificial
  Oligomer
cuccaggaaugaccaagaa

SEQ ID NO: 7249 - RNA, 19 nt, artificial
  Oligomer
aguuuugguccuacuaaau

SEQ ID NO: 7250 - RNA, 19 nt, artificial
  Oligomer
ccaugcuauacaucugcga

SEQ ID NO: 7251 - RNA, 19 nt, artificial
  Oligomer
accucuacauccugcucua

SEQ ID NO: 7252 - RNA, 19 nt, artificial
  Oligomer
ucaagaucccuaaggagua

SEQ ID NO: 7253 - RNA, 19 nt, artificial
  Oligomer
ucauccuugggcagccaaa

SEQ ID NO: 7254 - RNA, 19 nt, artificial
  Oligomer
caggagacuauguucuaca

SEQ ID NO: 7255 - RNA, 19 nt, artificial
  Oligomer
cagucaggaucucccaaag

SEQ ID NO: 7256 - RNA, 19 nt, artificial
  Oligomer
cuccauacucagcucuuua

SEQ ID NO: 7257 - RNA, 19 nt, artificial
  Oligomer
agauugaagacauccgaaa

SEQ ID NO: 7258 - RNA, 19 nt, artificial
  Oligomer
agaauggcuuccucuccaa

SEQ ID NO: 7259 - RNA, 19 nt, artificial
  Oligomer
uggaggugaaaagguacaa

SEQ ID NO: 7260 - RNA, 19 nt, artificial
  Oligomer
ucguguguguggcaaucuu

SEQ ID NO: 7261 - RNA, 19 nt, artificial
  Oligomer
augcgauccuucaucgaga

SEQ ID NO: 7262 - RNA, 19 nt, artificial
  Oligomer
ucuugaugucaccagugau

SEQ ID NO: 7263 - RNA, 19 nt, artificial
  Oligomer
uggcugagaugagcgagaa

SEQ ID NO: 7264 - RNA, 19 nt, artificial
  Oligomer
guaagaagaucuacuucau

SEQ ID NO: 7265 - RNA, 19 nt, artificial
  Oligomer
ccauguaugaccuggauga

SEQ ID NO: 7266 - RNA, 19 nt, artificial
  Oligomer
cccgucuaauguuuaccau

SEQ ID NO: 7267 - RNA, 19 nt, artificial
  Oligomer
agagagcgugaagaaggaa

SEQ ID NO: 7268 - RNA, 19 nt, artificial
  Oligomer
uauuggugguucuuccaga

SEQ ID NO: 7269 - RNA, 19 nt, artificial
  Oligomer
ccuccauacucagcucuuu

SEQ ID NO: 7270 - RNA, 19 nt, artificial
  Oligomer
caucugaacccaacaccac

SEQ ID NO: 7271 - RNA, 19 nt, artificial
  Oligomer
aggacaacauagugguuga

SEQ ID NO: 7272 - RNA, 19 nt, artificial
  Oligomer
ggcaaauucucccguacag

SEQ ID NO: 7273 - RNA, 19 nt, artificial
  Oligomer
gcuaccauguucuuuccga

SEQ ID NO: 7274 - RNA, 19 nt, artificial
  Oligomer
gaugcuuagaaccuggaca

SEQ ID NO: 7275 - RNA, 19 nt, artificial
  Oligomer
gaugugauuucuaccaaau

SEQ ID NO: 7276 - RNA, 19 nt, artificial
  Oligomer
acaucguguguguggcaau

SEQ ID NO: 7277 - RNA, 19 nt, artificial
  Oligomer
agaacaucgcuguguauga

SEQ ID NO: 7278 - RNA, 19 nt, artificial
  Oligomer
acuacuggauucgggagaa

SEQ ID NO: 7279 - RNA, 19 nt, artificial
  Oligomer
ccugguuuugccaucacca

SEQ ID NO: 7280 - RNA, 19 nt, artificial
  Oligomer
ccuccaggaaugaccaaga

SEQ ID NO: 7281 - RNA, 19 nt, artificial
  Oligomer
ccuggagaucuucuucaga

SEQ ID NO: 7282 - RNA, 19 nt, artificial
  Oligomer
gugucagcaacuuugagga

SEQ ID NO: 7283 - RNA, 19 nt, artificial
  Oligomer
aauuugugguggccucuga

SEQ ID NO: 7284 - RNA, 19 nt, artificial
  Oligomer
aagacaucugaacccaaca

SEQ ID NO: 7285 - RNA, 19 nt, artificial
  Oligomer
gaagcugugaugcuuagaa

SEQ ID NO: 7286 - RNA, 19 nt, artificial
  Oligomer
gcugagcuguaaaauauuu

SEQ ID NO: 7287 - RNA, 19 nt, artificial
  Oligomer
aagagguggaggagaacga

SEQ ID NO: 7288 - RNA, 19 nt, artificial
  Oligomer
gaaagugcugaaccggagu

SEQ ID NO: 7289 - RNA, 19 nt, artificial
  Oligomer
gaucgugcuuacuacuaug

SEQ ID NO: 7290 - RNA, 19 nt, artificial
  Oligomer
ccagucaggaucucccaaa

SEQ ID NO: 7291 - RNA, 19 nt, artificial
  Oligomer
caaugucuuugucuggcau

SEQ ID NO: 7292 - RNA, 19 nt, artificial
  Oligomer
agguggagguggaaauggu

SEQ ID NO: 7293 - RNA, 19 nt, artificial
  Oligomer
ucaggaguggcauaaauuu

SEQ ID NO: 7294 - RNA, 19 nt, artificial
  Oligomer
cccuguucagugccauugu

SEQ ID NO: 7295 - RNA, 19 nt, artificial
  Oligomer
ucugguuccgcuaccacaa

SEQ ID NO: 7296 - RNA, 19 nt, artificial
  Oligomer
cuggauacccaaagcugua

SEQ ID NO: 7297 - RNA, 19 nt, artificial
  Oligomer
gcugugcuggauacccaaa

SEQ ID NO: 7298 - RNA, 19 nt, artificial
  Oligomer
caaggcuuugaguacaagu

SEQ ID NO: 7299 - RNA, 19 nt, artificial
  Oligomer
cagccucucugccagauau

SEQ ID NO: 7300 - RNA, 19 nt, artificial
  Oligomer
ggcugguuuaacaaccuga

SEQ ID NO: 7301 - RNA, 19 nt, artificial
  Oligomer
aagaagagguuuggcaaaa

SEQ ID NO: 7302 - RNA, 19 nt, artificial
  Oligomer
ggagcucuucugacuggau

SEQ ID NO: 7303 - RNA, 19 nt, artificial
  Oligomer
gccuuugugcagcagcuau

SEQ ID NO: 7304 - RNA, 19 nt, artificial
  Oligomer
guguguguggcaaucuucu

SEQ ID NO: 7305 - RNA, 19 nt, artificial
  Oligomer
gagucuauguuccgggagu

SEQ ID NO: 7306 - RNA, 19 nt, artificial
  Oligomer
ccaaagaagauaaagacca

SEQ ID NO: 7307 - RNA, 19 nt, artificial
  Oligomer
caaugucuacaucuucuca

SEQ ID NO: 7308 - RNA, 19 nt, artificial
  Oligomer
gcugucgagucucguucau

SEQ ID NO: 7309 - RNA, 19 nt, artificial
  Oligomer
accgcuaugugccuuuuga

SEQ ID NO: 7310 - RNA, 19 nt, artificial
  Oligomer
cugaacaaggguuuucaaa

SEQ ID NO: 7311 - RNA, 19 nt, artificial
  Oligomer
gaaggcaagaaguagagca

SEQ ID NO: 7312 - RNA, 19 nt, artificial
  Oligomer
cauagugguugaagaucug

SEQ ID NO: 7313 - RNA, 19 nt, artificial
  Oligomer
guacucgaucucaauuccc

SEQ ID NO: 7314 - RNA, 19 nt, artificial
  Oligomer
ccaaaugcuguguaagaag

SEQ ID NO: 7315 - RNA, 19 nt, artificial
  Oligomer
aggugaaaagguacaauag

SEQ ID NO: 7316 - RNA, 19 nt, artificial
  Oligomer
uucucuucugugcaccuaa

SEQ ID NO: 7317 - RNA, 19 nt, artificial
  Oligomer
guuuugguccuacuaaaua

SEQ ID NO: 7318 - RNA, 19 nt, artificial
  Oligomer
ccagcugucauuuccggaa

SEQ ID NO: 7319 - RNA, 19 nt, artificial
  Oligomer
gaaugauggguccaagcuu

SEQ ID NO: 7320 - RNA, 19 nt, artificial
  Oligomer
ccagcgucuccuucauguu

SEQ ID NO: 7321 - RNA, 19 nt, artificial
  Oligomer
ugcgagagacuuuccucaa

SEQ ID NO: 7322 - RNA, 19 nt, artificial
  Oligomer
cgagaaggagcuauuuagg

SEQ ID NO: 7323 - RNA, 19 nt, artificial
  Oligomer
gcuggauacccaaagcugu

SEQ ID NO: 7324 - RNA, 19 nt, artificial
  Oligomer
aagcugagcuguaaaauau

SEQ ID NO: 7325 - RNA, 19 nt, artificial
  Oligomer
uggucccggcaaucaucua

SEQ ID NO: 7326 - RNA, 19 nt, artificial
  Oligomer
agucgggauuccaggacaa

SEQ ID NO: 7327 - RNA, 19 nt, artificial
  Oligomer
ggaucucccaaagaagaua

SEQ ID NO: 7328 - RNA, 19 nt, artificial
  Oligomer
ccuuuuucaucgggcucuu

SEQ ID NO: 7329 - RNA, 19 nt, artificial
  Oligomer
augacggcugguuuaacaa

SEQ ID NO: 7330 - RNA, 19 nt, artificial
  Oligomer
ccucauaaccuuccugcga

SEQ ID NO: 7331 - RNA, 19 nt, artificial
  Oligomer
caucuauggaggugacaag

SEQ ID NO: 7332 - RNA, 19 nt, artificial
  Oligomer
ccugcagcccaaugucuuu

SEQ ID NO: 7333 - RNA, 19 nt, artificial
  Oligomer
gcagugcaugaugauuaua

SEQ ID NO: 7334 - RNA, 19 nt, artificial
  Oligomer
gacccagagagaaagguga

SEQ ID NO: 7335 - RNA, 19 nt, artificial
  Oligomer
gguuuucaaagcucccaag

SEQ ID NO: 7336 - RNA, 19 nt, artificial
  Oligomer
agcugacaugggaggauuu

SEQ ID NO: 7337 - RNA, 19 nt, artificial
  Oligomer
cuguuguccuggccauuuu

SEQ ID NO: 7338 - RNA, 19 nt, artificial
  Oligomer
ucaucuauggaggugacaa

SEQ ID NO: 7339 - RNA, 19 nt, artificial
  Oligomer
caaucaucuauggagguga

SEQ ID NO: 7340 - RNA, 19 nt, artificial
  Oligomer
ggcaccaggaaacaaagau

SEQ ID NO: 7341 - RNA, 19 nt, artificial
  Oligomer
gaauguagagaaggccugu

SEQ ID NO: 7342 - RNA, 19 nt, artificial
  Oligomer
agcaaagauuuuaagagga

SEQ ID NO: 7343 - RNA, 19 nt, artificial
  Oligomer
ggcaagaaguagagcacag

SEQ ID NO: 7344 - RNA, 19 nt, artificial
  Oligomer
guuuugccaucaccaucau

SEQ ID NO: 7345 - RNA, 19 nt, artificial
  Oligomer
agcuacaaaagaaacucaa

SEQ ID NO: 7346 - RNA, 19 nt, artificial
  Oligomer
agauaaagaccacuccuca

SEQ ID NO: 7347 - RNA, 19 nt, artificial
  Oligomer
auucccuccagcuccaaaa

SEQ ID NO: 7348 - RNA, 19 nt, artificial
  Oligomer
cauuguccucgaccaguuu

SEQ ID NO: 7349 - RNA, 19 nt, artificial
  Oligomer
ugcagcaggucaaccucau

SEQ ID NO: 7350 - RNA, 19 nt, artificial
  Oligomer
uggagaucuucuucagaca

SEQ ID NO: 7351 - RNA, 19 nt, artificial
  Oligomer
cggcaaucaucuauggagg

SEQ ID NO: 7352 - RNA, 19 nt, artificial
  Oligomer
uggagguggagguggaaau

SEQ ID NO: 7353 - RNA, 19 nt, artificial
  Oligomer
gagcuauuuaggaaggcug

SEQ ID NO: 7354 - RNA, 19 nt, artificial
  Oligomer
aggcaagaaguagagcaca

SEQ ID NO: 7355 - RNA, 19 nt, artificial
  Oligomer
gcacauuuaugucacccag

SEQ ID NO: 7356 - RNA, 19 nt, artificial
  Oligomer
aguacaagcgcuucgugga

SEQ ID NO: 7357 - RNA, 19 nt, artificial
  Oligomer
cucagggucugcaacaacu

SEQ ID NO: 7358 - RNA, 19 nt, artificial
  Oligomer
cccuagcuccuagaagcaa

SEQ ID NO: 7359 - RNA, 19 nt, artificial
  Oligomer
uccauacucagcucuuuaa

SEQ ID NO: 7360 - RNA, 19 nt, artificial
  Oligomer
caucucuaauugacuucca

SEQ ID NO: 7361 - RNA, 19 nt, artificial
  Oligomer
ccuuccugcgagagacuuu

SEQ ID NO: 7362 - RNA, 19 nt, artificial
  Oligomer
agaaaugccagcugucauu

SEQ ID NO: 7363 - RNA, 19 nt, artificial
  Oligomer
ccacuuuccacaucuacuu

SEQ ID NO: 7364 - RNA, 19 nt, artificial
  Oligomer
caaagagagcgugaagaag

SEQ ID NO: 7365 - RNA, 19 nt, artificial
  Oligomer
ccaucaccaucauugcucu

SEQ ID NO: 7366 - RNA, 19 nt, artificial
  Oligomer
cgcugcaagagaagaugca

SEQ ID NO: 7367 - RNA, 19 nt, artificial
  Oligomer
caauggcugugcuggauac

SEQ ID NO: 7368 - RNA, 19 nt, artificial
  Oligomer
ggucccggcaaucaucuau

SEQ ID NO: 7369 - RNA, 19 nt, artificial
  Oligomer
ggucuucuuuggcuaccau

SEQ ID NO: 7370 - RNA, 19 nt, artificial
  Oligomer
guggagguggaaaugguau

SEQ ID NO: 7371 - RNA, 19 nt, artificial
  Oligomer
ugcuguuuaguucugaaga

SEQ ID NO: 7372 - RNA, 19 nt, artificial
  Oligomer
cgggcucuuuccuaaaaag

SEQ ID NO: 7373 - RNA, 19 nt, artificial
  Oligomer
gauaccguccuuuccuaga

SEQ ID NO: 7374 - RNA, 19 nt, artificial
  Oligomer
guggaggugaaaagguaca

SEQ ID NO: 7375 - RNA, 19 nt, artificial
  Oligomer
gugagggugaaggcaagaa

SEQ ID NO: 7376 - RNA, 19 nt, artificial
  Oligomer
cccggcaaucaucuaugga

SEQ ID NO: 7377 - RNA, 19 nt, artificial
  Oligomer
gccagauauucaguacucg

SEQ ID NO: 7378 - RNA, 19 nt, artificial
  Oligomer
ccauguucucucuggcuga

SEQ ID NO: 7379 - RNA, 19 nt, artificial
  Oligomer
cccacuuuccacaucuacu

SEQ ID NO: 7380 - RNA, 19 nt, artificial
  Oligomer
caacauagugguugaagau

SEQ ID NO: 7381 - RNA, 19 nt, artificial
  Oligomer
ccagcccugauauucuuga

SEQ ID NO: 7382 - RNA, 19 nt, artificial
  Oligomer
uugacccagacaauuauac

SEQ ID NO: 7383 - RNA, 19 nt, artificial
  Oligomer
gauuuuaagaggaaagaag

SEQ ID NO: 7384 - RNA, 19 nt, artificial
  Oligomer
gaagacaucugaacccaac

SEQ ID NO: 7385 - RNA, 19 nt, artificial
  Oligomer
cuuuugaugccgcagugga

SEQ ID NO: 7386 - RNA, 19 nt, artificial
  Oligomer
gcuuggacugacauuugag

SEQ ID NO: 7387 - RNA, 19 nt, artificial
  Oligomer
gcuggcaaucucuccauca

SEQ ID NO: 7388 - RNA, 19 nt, artificial
  Oligomer
ggugucugugcacauuuau

SEQ ID NO: 7389 - RNA, 19 nt, artificial
  Oligomer
gcuggcugacaucauccaa

SEQ ID NO: 7390 - RNA, 19 nt, artificial
  Oligomer
uggcguguuugcagaucgu

SEQ ID NO: 7391 - RNA, 19 nt, artificial
  Oligomer
cccacaucucuaauugacu

SEQ ID NO: 7392 - RNA, 19 nt, artificial
  Oligomer
uauucccuccagcuccaaa

SEQ ID NO: 7393 - RNA, 19 nt, artificial
  Oligomer
uguuuaguucugaagagga

SEQ ID NO: 7394 - RNA, 19 nt, artificial
  Oligomer
cuacaauugcagugcauga

SEQ ID NO: 7395 - RNA, 19 nt, artificial
  Oligomer
uggcugacaaggauggcaa

SEQ ID NO: 7396 - RNA, 19 nt, artificial
  Oligomer
ucaucgccaccuaccagaa

SEQ ID NO: 7397 - RNA, 19 nt, artificial
  Oligomer
uggcugacaucauccaaga

SEQ ID NO: 7398 - RNA, 19 nt, artificial
  Oligomer
gacuuuccucaaccgcuau

SEQ ID NO: 7399 - RNA, 19 nt, artificial
  Oligomer
cccaauauugggagaauau

SEQ ID NO: 7400 - RNA, 19 nt, artificial
  Oligomer
aggauaccguccuuuccua

SEQ ID NO: 7401 - RNA, 19 nt, artificial
  Oligomer
uggagugaucucaacccua

SEQ ID NO: 7402 - RNA, 19 nt, artificial
  Oligomer
caaguguggaggugaaaag

SEQ ID NO: 7403 - RNA, 19 nt, artificial
  Oligomer
ccucucugccagauauuca

SEQ ID NO: 7404 - RNA, 19 nt, artificial
  Oligomer
gaaguagagcacagaagca

SEQ ID NO: 7405 - RNA, 19 nt, artificial
  Oligomer
gguuugagaacaccaggaa

SEQ ID NO: 7406 - RNA, 19 nt, artificial
  Oligomer
ucugcugccuucccuuagu

SEQ ID NO: 7407 - RNA, 19 nt, artificial
  Oligomer
agaacuaccggaggcacau

SEQ ID NO: 7408 - RNA, 19 nt, artificial
  Oligomer
cuggucaccuuacgcaaga

SEQ ID NO: 7409 - RNA, 19 nt, artificial
  Oligomer
ccucucugcaucuacugga

SEQ ID NO: 7410 - RNA, 19 nt, artificial
  Oligomer
agaaagugcugaaccggag

SEQ ID NO: 7411 - RNA, 19 nt, artificial
  Oligomer
gagaauggcuuccucucca

SEQ ID NO: 7412 - RNA, 19 nt, artificial
  Oligomer
accagaacaucgcugugua

SEQ ID NO: 7413 - RNA, 19 nt, artificial
  Oligomer
aggcgcugcaagagaagau

SEQ ID NO: 7414 - RNA, 19 nt, artificial
  Oligomer
cucuaugcccugcucauca

SEQ ID NO: 7415 - RNA, 19 nt, artificial
  Oligomer
gcauccuggagaucuucuu

SEQ ID NO: 7416 - RNA, 19 nt, artificial
  Oligomer
accaaggacccagagagaa

SEQ ID NO: 7417 - RNA, 19 nt, artificial
  Oligomer
cuggagugguggccuauuu

SEQ ID NO: 7418 - RNA, 19 nt, artificial
  Oligomer
gggucuucuuuggcuacca

SEQ ID NO: 7419 - RNA, 19 nt, artificial
  Oligomer
cugugcuugacuucuuuga

SEQ ID NO: 7420 - RNA, 19 nt, artificial
  Oligomer
ucaccuuacgcaagagcca

SEQ ID NO: 7421 - RNA, 19 nt, artificial
  Oligomer
ucgaugcguugcuuuggua

SEQ ID NO: 7422 - RNA, 19 nt, artificial
  Oligomer
cgcagucaaugucuacauc

SEQ ID NO: 7423 - RNA, 19 nt, artificial
  Oligomer
cauccuugggcagccaaau

SEQ ID NO: 7424 - RNA, 19 nt, artificial
  Oligomer
cuuugccuccauccucaaa

SEQ ID NO: 7425 - RNA, 19 nt, artificial
  Oligomer
ugggaggauuuucacuuca

SEQ ID NO: 7426 - RNA, 19 nt, artificial
  Oligomer
gagaaaggugagagugcag

SEQ ID NO: 7427 - RNA, 19 nt, artificial
  Oligomer
agugagggugaaggcaaga

SEQ ID NO: 7428 - RNA, 19 nt, artificial
  Oligomer
caaggaacuggagugaucu

SEQ ID NO: 7429 - RNA, 19 nt, artificial
  Oligomer
gucccaucaucauccagcu

SEQ ID NO: 7430 - RNA, 19 nt, artificial
  Oligomer
aggucaagacauagaaugu

SEQ ID NO: 7431 - RNA, 19 nt, artificial
  Oligomer
gcaugaugauuauaagucc

SEQ ID NO: 7432 - RNA, 19 nt, artificial
  Oligomer
cugccuucccuuagugagu

SEQ ID NO: 7433 - RNA, 19 nt, artificial
  Oligomer
guaugacaggugugcuucu

SEQ ID NO: 7434 - RNA, 19 nt, artificial
  Oligomer
agauuucggaguuggagga

SEQ ID NO: 7435 - RNA, 19 nt, artificial
  Oligomer
gcuguuuaguucugaagag

SEQ ID NO: 7436 - RNA, 19 nt, artificial
  Oligomer
aacgcauccuggagaucuu

SEQ ID NO: 7437 - RNA, 19 nt, artificial
  Oligomer
caaggauggcaauggcuac

SEQ ID NO: 7438 - RNA, 19 nt, artificial
  Oligomer
gucugcaacaacuacugga

SEQ ID NO: 7439 - RNA, 19 nt, artificial
  Oligomer
aauagugcuugucuccgau

SEQ ID NO: 7440 - RNA, 19 nt, artificial
  Oligomer
guacccaggaggugaauga

SEQ ID NO: 7441 - RNA, 19 nt, artificial
  Oligomer
aaaugcuguguaagaagau

SEQ ID NO: 7442 - RNA, 19 nt, artificial
  Oligomer
cuauucccuccagcuccaa

SEQ ID NO: 7443 - RNA, 19 nt, artificial
  Oligomer
agcugucgagucucguuca

SEQ ID NO: 7444 - RNA, 19 nt, artificial
  Oligomer
ccaaggcuuugaguacaag

SEQ ID NO: 7445 - RNA, 19 nt, artificial
  Oligomer
ccuuagugagucugcuucu

SEQ ID NO: 7446 - RNA, 19 nt, artificial
  Oligomer
ucauccagcugcugucaga

SEQ ID NO: 7447 - RNA, 19 nt, artificial
  Oligomer
ucaaagaccuggucuucaa

SEQ ID NO: 7448 - RNA, 19 nt, artificial
  Oligomer
gcugguuuaacaaccugag

SEQ ID NO: 7449 - RNA, 19 nt, artificial
  Oligomer
ugucuuugucuggcauaaa

SEQ ID NO: 7450 - RNA, 19 nt, artificial
  Oligomer
ugagcgagaaggagcuauu

SEQ ID NO: 7451 - RNA, 19 nt, artificial
  Oligomer
ggcuuugaguacaagucag

SEQ ID NO: 7452 - RNA, 19 nt, artificial
  Oligomer
cagaagcugugaugcuuag

SEQ ID NO: 7453 - RNA, 19 nt, artificial
  Oligomer
aauucucccguacagacua

SEQ ID NO: 7454 - RNA, 19 nt, artificial
  Oligomer
uggagguggaaaugguauu

SEQ ID NO: 7455 - RNA, 19 nt, artificial
  Oligomer
ugugccuuuugaugccgca

SEQ ID NO: 7456 - RNA, 19 nt, artificial
  Oligomer
ccuccauccucaaagaccu

SEQ ID NO: 7457 - RNA, 19 nt, artificial
  Oligomer
caguacccaggaggugaau

SEQ ID NO: 7458 - RNA, 19 nt, artificial
  Oligomer
ccuucuucaacucccugca

SEQ ID NO: 7459 - RNA, 19 nt, artificial
  Oligomer
ccaucuguguuggcguguu

SEQ ID NO: 7460 - RNA, 19 nt, artificial
  Oligomer
ccaaugucuuugucuggca

SEQ ID NO: 7461 - RNA, 19 nt, artificial
  Oligomer
ccauguucuuuccgacgug

SEQ ID NO: 7462 - RNA, 19 nt, artificial
  Oligomer
caaaagcugcagcaguaca

SEQ ID NO: 7463 - RNA, 19 nt, artificial
  Oligomer
cgagaacacaagaagcuac

SEQ ID NO: 7464 - RNA, 19 nt, artificial
  Oligomer
uggcaaucucuccaucaga

SEQ ID NO: 7465 - RNA, 19 nt, artificial
  Oligomer
ucauguacauguuuuacca

SEQ ID NO: 7466 - RNA, 19 nt, artificial
  Oligomer
acaaggauggcaauggcua

SEQ ID NO: 7467 - RNA, 19 nt, artificial
  Oligomer
agguaugacaggugugcuu

SEQ ID NO: 7468 - RNA, 19 nt, artificial
  Oligomer
gugacaaguguggagguga

SEQ ID NO: 7469 - RNA, 19 nt, artificial
  Oligomer
ugagggugaaggcaagaag

SEQ ID NO: 7470 - RNA, 19 nt, artificial
  Oligomer
cugaugugauuucuaccaa

SEQ ID NO: 7471 - RNA, 19 nt, artificial
  Oligomer
ccagaacaucgcuguguau

SEQ ID NO: 7472 - RNA, 19 nt, artificial
  Oligomer
guugaagaucugagggauu

SEQ ID NO: 7473 - RNA, 19 nt, artificial
  Oligomer
agacagucccugcuuguga

SEQ ID NO: 7474 - RNA, 19 nt, artificial
  Oligomer
gcucugugucaaaggugga

SEQ ID NO: 7475 - RNA, 19 nt, artificial
  Oligomer
gguccugaacaaggguuuu

SEQ ID NO: 7476 - RNA, 19 nt, artificial
  Oligomer
gggucugcaacaacuacug

SEQ ID NO: 7477 - RNA, 19 nt, artificial
  Oligomer
uguacauguuuuaccacca

SEQ ID NO: 7478 - RNA, 19 nt, artificial
  Oligomer
agagcacagaagcaaagau

SEQ ID NO: 7479 - RNA, 19 nt, artificial
  Oligomer
cugaagaagagguuuggca

SEQ ID NO: 7480 - RNA, 19 nt, artificial
  Oligomer
gaugcguugcuuugguauu

SEQ ID NO: 7481 - RNA, 19 nt, artificial
  Oligomer
ugugaaugauggguccaag

SEQ ID NO: 7482 - RNA, 19 nt, artificial
  Oligomer
ugguccuggccaucaugua

SEQ ID NO: 7483 - RNA, 19 nt, artificial
  Oligomer
ucuauucccuccagcucca

SEQ ID NO: 7484 - RNA, 19 nt, artificial
  Oligomer
caaaaucgaugcguugcuu

SEQ ID NO: 7485 - RNA, 19 nt, artificial
  Oligomer
ucucugcugccuucccuua

SEQ ID NO: 7486 - RNA, 19 nt, artificial
  Oligomer
gcaaucucuccaucagaau

SEQ ID NO: 7487 - RNA, 19 nt, artificial
  Oligomer
aggaccuaucccagcuaga

SEQ ID NO: 7488 - RNA, 19 nt, artificial
  Oligomer
ggucgcuguuaucaacauu

SEQ ID NO: 7489 - RNA, 19 nt, artificial
  Oligomer
ccuagcuccuagaagcaac

SEQ ID NO: 7490 - RNA, 19 nt, artificial
  Oligomer
cagggucugcaacaacuac

SEQ ID NO: 7491 - RNA, 19 nt, artificial
  Oligomer
ccagugcagaagcugugau

SEQ ID NO: 7492 - RNA, 19 nt, artificial
  Oligomer
aaugagaaaaggcaggaga

SEQ ID NO: 7493 - RNA, 19 nt, artificial
  Oligomer
gaagguccugaacaagggu

SEQ ID NO: 7494 - RNA, 19 nt, artificial
  Oligomer
aguuugaguggcuggcuga

SEQ ID NO: 7495 - RNA, 19 nt, artificial
  Oligomer
ugcuggucgcuguuaucaa

SEQ ID NO: 7496 - RNA, 19 nt, artificial
  Oligomer
acauccugguggucuucau

SEQ ID NO: 7497 - RNA, 19 nt, artificial
  Oligomer
gugauuucuaccaaaucca

SEQ ID NO: 7498 - RNA, 19 nt, artificial
  Oligomer
ugcgauccuucaucgagau

SEQ ID NO: 7499 - RNA, 19 nt, artificial
  Oligomer
aguuccucaacauccgcau

SEQ ID NO: 7500 - RNA, 19 nt, artificial
  Oligomer
cccaaagugucagcaacuu

SEQ ID NO: 7501 - RNA, 19 nt, artificial
  Oligomer
uggccaucauguaugucuu

SEQ ID NO: 7502 - RNA, 19 nt, artificial
  Oligomer
acuauguucuacaauugca

SEQ ID NO: 7503 - RNA, 19 nt, artificial
  Oligomer
ugagaaaugccagcuguca

SEQ ID NO: 7504 - RNA, 19 nt, artificial
  Oligomer
cagaagcaaagauuuuaag

SEQ ID NO: 7505 - RNA, 19 nt, artificial
  Oligomer
gcaaccucauaaccuuccu

SEQ ID NO: 7506 - RNA, 19 nt, artificial
  Oligomer
auugucugggucaauauuc

SEQ ID NO: 7507 - RNA, 19 nt, artificial
  Oligomer
auuuguauaauugucuggg

SEQ ID NO: 7508 - RNA, 19 nt, artificial
  Oligomer
uuuagggugguguuggguu

SEQ ID NO: 7509 - RNA, 19 nt, artificial
  Oligomer
ugguuuagggugguguugg

SEQ ID NO: 7510 - RNA, 19 nt, artificial
  Oligomer
uuguauaauugucuggguc

SEQ ID NO: 7511 - RNA, 19 nt, artificial
  Oligomer
uugucugggucaauauucu

SEQ ID NO: 7512 - RNA, 19 nt, artificial
  Oligomer
uugagaucgaguacugaau

SEQ ID NO: 7513 - RNA, 19 nt, artificial
  Oligomer
uguauaauugucuggguca

SEQ ID NO: 7514 - RNA, 19 nt, artificial
  Oligomer
uuuaguaggaccaaaacug

SEQ ID NO: 7515 - RNA, 19 nt, artificial
  Oligomer
uuuguauaauugucugggu

SEQ ID NO: 7516 - RNA, 19 nt, artificial
  Oligomer
auugagaucgaguacugaa

SEQ ID NO: 7517 - RNA, 19 nt, artificial
  Oligomer
uagggugguguuggguuca

SEQ ID NO: 7518 - RNA, 19 nt, artificial
  Oligomer
ucugggucaauauucuccc

SEQ ID NO: 7519 - RNA, 19 nt, artificial
  Oligomer
ucgaguacugaauaucugg

SEQ ID NO: 7520 - RNA, 19 nt, artificial
  Oligomer
uuugaguuucuuuuguagc

SEQ ID NO: 7521 - RNA, 19 nt, artificial
  Oligomer
uauaauugucugggucaau

SEQ ID NO: 7522 - RNA, 19 nt, artificial
  Oligomer
uuucuuuuguagcuucuug

SEQ ID NO: 7523 - RNA, 19 nt, artificial
  Oligomer
uaauugucugggucaauau

SEQ ID NO: 7524 - RNA, 19 nt, artificial
  Oligomer
uugagaucacuccaguucc

SEQ ID NO: 7525 - RNA, 19 nt, artificial
  Oligomer
uucucauguagacaccagg

SEQ ID NO: 7526 - RNA, 19 nt, artificial
  Oligomer
auaauugucugggucaaua

SEQ ID NO: 7527 - RNA, 19 nt, artificial
  Oligomer
uauguuguccuccaacucc

SEQ ID NO: 7528 - RNA, 19 nt, artificial
  Oligomer
uucagaacuaaacagcagc

SEQ ID NO: 7529 - RNA, 19 nt, artificial
  Oligomer
uuuguuuccuggugcccuc

SEQ ID NO: 7530 - RNA, 19 nt, artificial
  Oligomer
uuugguagaaaucacauca

SEQ ID NO: 7531 - RNA, 19 nt, artificial
  Oligomer
ucuaauaccauuuccaccu

SEQ ID NO: 7532 - RNA, 19 nt, artificial
  Oligomer
uucugugcucuacuucuug

SEQ ID NO: 7533 - RNA, 19 nt, artificial
  Oligomer
ugagaucgaguacugaaua

SEQ ID NO: 7534 - RNA, 19 nt, artificial
  Oligomer
uaccauuuccaccuccacc

SEQ ID NO: 7535 - RNA, 19 nt, artificial
  Oligomer
uuugccaaaccucuucuuc

SEQ ID NO: 7536 - RNA, 19 nt, artificial
  Oligomer
uuugcuucugugcucuacu

SEQ ID NO: 7537 - RNA, 19 nt, artificial
  Oligomer
ugguguuggguucagaugu

SEQ ID NO: 7538 - RNA, 19 nt, artificial
  Oligomer
ucuacauucuuggucauuc

SEQ ID NO: 7539 - RNA, 19 nt, artificial
  Oligomer
uaguggugcaugaaguggg

SEQ ID NO: 7540 - RNA, 19 nt, artificial
  Oligomer
uuguagaacauagucuccu

SEQ ID NO: 7541 - RNA, 19 nt, artificial
  Oligomer
gaucgaguacugaauaucu

SEQ ID NO: 7542 - RNA, 19 nt, artificial
  Oligomer
ucuacuucuugccuucacc

SEQ ID NO: 7543 - RNA, 19 nt, artificial
  Oligomer
aauugagaucgaguacuga

SEQ ID NO: 7544 - RNA, 19 nt, artificial
  Oligomer
uuggagaucucgaugaagg

SEQ ID NO: 7545 - RNA, 19 nt, artificial
  Oligomer
uuccucuucagaacuaaac

SEQ ID NO: 7546 - RNA, 19 nt, artificial
  Oligomer
gugguuuagggugguguug

SEQ ID NO: 7547 - RNA, 19 nt, artificial
  Oligomer
ugagagugcguccugauug

SEQ ID NO: 7548 - RNA, 19 nt, artificial
  Oligomer
uuuugggcuaggaagccuc

SEQ ID NO: 7549 - RNA, 19 nt, artificial
  Oligomer
uuggguucagaugucuucu

SEQ ID NO: 7550 - RNA, 19 nt, artificial
  Oligomer
uuuuguggaagucaauuag

SEQ ID NO: 7551 - RNA, 19 nt, artificial
  Oligomer
uugccaaaccucuucuuca

SEQ ID NO: 7552 - RNA, 19 nt, artificial
  Oligomer
uucacccucacucuuccag

SEQ ID NO: 7553 - RNA, 19 nt, artificial
  Oligomer
uuuuugccaaaccucuucu

SEQ ID NO: 7554 - RNA, 19 nt, artificial
  Oligomer
ugucugggucaauauucuc

SEQ ID NO: 7555 - RNA, 19 nt, artificial
  Oligomer
aagauguagacauugacug

SEQ ID NO: 7556 - RNA, 19 nt, artificial
  Oligomer
uuacagcucagcuuuuuag

SEQ ID NO: 7557 - RNA, 19 nt, artificial
  Oligomer
auucucauccaggucauac

SEQ ID NO: 7558 - RNA, 19 nt, artificial
  Oligomer
ucggaugucuucaaucucc

SEQ ID NO: 7559 - RNA, 19 nt, artificial
  Oligomer
auucuaugucuugaccugg

SEQ ID NO: 7560 - RNA, 19 nt, artificial
  Oligomer
auguuguccuccaacuccg

SEQ ID NO: 7561 - RNA, 19 nt, artificial
  Oligomer
aucgaguacugaauaucug

SEQ ID NO: 7562 - RNA, 19 nt, artificial
  Oligomer
uuucaugaagaccaccagg

SEQ ID NO: 7563 - RNA, 19 nt, artificial
  Oligomer
uuggacaggcaguuguugg

SEQ ID NO: 7564 - RNA, 19 nt, artificial
  Oligomer
uuuaggaaagagcccgaug

SEQ ID NO: 7565 - RNA, 19 nt, artificial
  Oligomer
uuguucaggaccuuccgga

SEQ ID NO: 7566 - RNA, 19 nt, artificial
  Oligomer
uucaccacgcugaucucca

SEQ ID NO: 7567 - RNA, 19 nt, artificial
  Oligomer
uugauguccagcaccugag

SEQ ID NO: 7568 - RNA, 19 nt, artificial
  Oligomer
guuuagggugguguugggu

SEQ ID NO: 7569 - RNA, 19 nt, artificial
  Oligomer
agaagauguagacauugac

SEQ ID NO: 7570 - RNA, 19 nt, artificial
  Oligomer
uugaaaacccuuguucagg

SEQ ID NO: 7571 - RNA, 19 nt, artificial
  Oligomer
uuuuguagcuucuuguguu

SEQ ID NO: 7572 - RNA, 19 nt, artificial
  Oligomer
uuacacagcauuuggcugc

SEQ ID NO: 7573 - RNA, 19 nt, artificial
  Oligomer
uacagcucagcuuuuuagg

SEQ ID NO: 7574 - RNA, 19 nt, artificial
  Oligomer
uccuucuucacgcucucuu

SEQ ID NO: 7575 - RNA, 19 nt, artificial
  Oligomer
augaagugaaaauccuccc

SEQ ID NO: 7576 - RNA, 19 nt, artificial
  Oligomer
auauaagagaacaugaagg

SEQ ID NO: 7577 - RNA, 19 nt, artificial
  Oligomer
uuguuggacaggaugaggu

SEQ ID NO: 7578 - RNA, 19 nt, artificial
  Oligomer
uauuguaccuuuucaccuc

SEQ ID NO: 7579 - RNA, 19 nt, artificial
  Oligomer
uuggcugcuuccuucuuca

SEQ ID NO: 7580 - RNA, 19 nt, artificial
  Oligomer
aucccucagaucuucaacc

SEQ ID NO: 7581 - RNA, 19 nt, artificial
  Oligomer
ucucauguagacaccaggg

SEQ ID NO: 7582 - RNA, 19 nt, artificial
  Oligomer
uuugucacagccuuccuaa

SEQ ID NO: 7583 - RNA, 19 nt, artificial
  Oligomer
ucagaaguucucauagugg

SEQ ID NO: 7584 - RNA, 19 nt, artificial
  Oligomer
ucugaggagauucucagcc

SEQ ID NO: 7585 - RNA, 19 nt, artificial
  Oligomer
auaaucaucaugcacugca

SEQ ID NO: 7586 - RNA, 19 nt, artificial
  Oligomer
uagcuucuuguguucucgg

SEQ ID NO: 7587 - RNA, 19 nt, artificial
  Oligomer
uagcgguugaggaaagucu

SEQ ID NO: 7588 - RNA, 19 nt, artificial
  Oligomer
uuucaccuccacacuuguc

SEQ ID NO: 7589 - RNA, 19 nt, artificial
  Oligomer
uggaauugcagguagguca

SEQ ID NO: 7590 - RNA, 19 nt, artificial
  Oligomer
ucauucacaaagacguugg

SEQ ID NO: 7591 - RNA, 19 nt, artificial
  Oligomer
uaaaugugcacagacacca

SEQ ID NO: 7592 - RNA, 19 nt, artificial
  Oligomer
gaagauguagacauugacu

SEQ ID NO: 7593 - RNA, 19 nt, artificial
  Oligomer
acuucuugccuucacccuc

SEQ ID NO: 7594 - RNA, 19 nt, artificial
  Oligomer
ucugugcucuacuucuugc

SEQ ID NO: 7595 - RNA, 19 nt, artificial
  Oligomer
uuuaugccacuccugaugg

SEQ ID NO: 7596 - RNA, 19 nt, artificial
  Oligomer
uccaccuccaccuuugaca

SEQ ID NO: 7597 - RNA, 19 nt, artificial
  Oligomer
auuucggaugucuucaauc

SEQ ID NO: 7598 - RNA, 19 nt, artificial
  Oligomer
ugucaguccaagcaaauac

SEQ ID NO: 7599 - RNA, 19 nt, artificial
  Oligomer
gucugggucaauauucucc

SEQ ID NO: 7600 - RNA, 19 nt, artificial
  Oligomer
uuucucauguagacaccag

SEQ ID NO: 7601 - RNA, 19 nt, artificial
  Oligomer
cuaagguggauucugaugg

SEQ ID NO: 7602 - RNA, 19 nt, artificial
  Oligomer
uuauaaucaucaugcacug

SEQ ID NO: 7603 - RNA, 19 nt, artificial
  Oligomer
agcagcuggaugaugaugg

SEQ ID NO: 7604 - RNA, 19 nt, artificial
  Oligomer
uucucuacauucuugguca

SEQ ID NO: 7605 - RNA, 19 nt, artificial
  Oligomer
uucuccacgaagcgcuugu

SEQ ID NO: 7606 - RNA, 19 nt, artificial
  Oligomer
uagacauugacugcguggc

SEQ ID NO: 7607 - RNA, 19 nt, artificial
  Oligomer
aagguuaugagguugcggc

SEQ ID NO: 7608 - RNA, 19 nt, artificial
  Oligomer
uucagaugucuucuuuccu

SEQ ID NO: 7609 - RNA, 19 nt, artificial
  Oligomer
uccgguucagcacuuucug

SEQ ID NO: 7610 - RNA, 19 nt, artificial
  Oligomer
uguuucagccuggcucuug

SEQ ID NO: 7611 - RNA, 19 nt, artificial
  Oligomer
uuagggaucuugagcagca

SEQ ID NO: 7612 - RNA, 19 nt, artificial
  Oligomer
uaaaccagccgucauagcg

SEQ ID NO: 7613 - RNA, 19 nt, artificial
  Oligomer
auuguaccuuuucaccucc

SEQ ID NO: 7614 - RNA, 19 nt, artificial
  Oligomer
auuaggguugagaucacuc

SEQ ID NO: 7615 - RNA, 19 nt, artificial
  Oligomer
cuuccuaaauagcuccuuc

SEQ ID NO: 7616 - RNA, 19 nt, artificial
  Oligomer
aucagugguugcuucuagg

SEQ ID NO: 7617 - RNA, 19 nt, artificial
  Oligomer
uacugcugcagcuuuuggg

SEQ ID NO: 7618 - RNA, 19 nt, artificial
  Oligomer
augaugaugggacugcucc

SEQ ID NO: 7619 - RNA, 19 nt, artificial
  Oligomer
ucuuuguuuccuggugccc

SEQ ID NO: 7620 - RNA, 19 nt, artificial
  Oligomer
uugccuucacccucacucu

SEQ ID NO: 7621 - RNA, 19 nt, artificial
  Oligomer
ggaauugagaucgaguacu

SEQ ID NO: 7622 - RNA, 19 nt, artificial
  Oligomer
acagccuuccuaaauagcu

SEQ ID NO: 7623 - RNA, 19 nt, artificial
  Oligomer
uugggagcuuugaaaaccc

SEQ ID NO: 7624 - RNA, 19 nt, artificial
  Oligomer
ucucuuugaguuucuuuug

SEQ ID NO: 7625 - RNA, 19 nt, artificial
  Oligomer
agccuuccuaaauagcucc

SEQ ID NO: 7626 - RNA, 19 nt, artificial
  Oligomer
aauugucugggucaauauu

SEQ ID NO: 7627 - RNA, 19 nt, artificial
  Oligomer
uugugagcugcuuagguug

SEQ ID NO: 7628 - RNA, 19 nt, artificial
  Oligomer
ugccuuuuugccaaaccuc

SEQ ID NO: 7629 - RNA, 19 nt, artificial
  Oligomer
uuuacagcucagcuuuuua

SEQ ID NO: 7630 - RNA, 19 nt, artificial
  Oligomer
uugauaaacagguggacuu

SEQ ID NO: 7631 - RNA, 19 nt, artificial
  Oligomer
uugaggauggaggcaaagg

SEQ ID NO: 7632 - RNA, 19 nt, artificial
  Oligomer
aaagaagucaagcacaguc

SEQ ID NO: 7633 - RNA, 19 nt, artificial
  Oligomer
uuggacaggaugagguuga

SEQ ID NO: 7634 - RNA, 19 nt, artificial
  Oligomer
aucaaaaggcacauagcgg

SEQ ID NO: 7635 - RNA, 19 nt, artificial
  Oligomer
augacagcuggcauuucuc

SEQ ID NO: 7636 - RNA, 19 nt, artificial
  Oligomer
cuuauaaucaucaugcacu

SEQ ID NO: 7637 - RNA, 19 nt, artificial
  Oligomer
uuguugcagacccugagag

SEQ ID NO: 7638 - RNA, 19 nt, artificial
  Oligomer
uucuaugucuugaccuggg

SEQ ID NO: 7639 - RNA, 19 nt, artificial
  Oligomer
gaauugagaucgaguacug

SEQ ID NO: 7640 - RNA, 19 nt, artificial
  Oligomer
acuauuguaccuuuucacc

SEQ ID NO: 7641 - RNA, 19 nt, artificial
  Oligomer
uugaagaagggcucgaagg

SEQ ID NO: 7642 - RNA, 19 nt, artificial
  Oligomer
ucggagacaagcacuauug

SEQ ID NO: 7643 - RNA, 19 nt, artificial
  Oligomer
uauuuuacagcucagcuuu

SEQ ID NO: 7644 - RNA, 19 nt, artificial
  Oligomer
aguauauuuaguaggacca

SEQ ID NO: 7645 - RNA, 19 nt, artificial
  Oligomer
uucaaccacuauguugucc

SEQ ID NO: 7646 - RNA, 19 nt, artificial
  Oligomer
caugaagugaaaauccucc

SEQ ID NO: 7647 - RNA, 19 nt, artificial
  Oligomer
uacaugguaaacauuagac

SEQ ID NO: 7648 - RNA, 19 nt, artificial
  Oligomer
uccuccucccucaaauguc

SEQ ID NO: 7649 - RNA, 19 nt, artificial
  Oligomer
ucucgcaggaagguuauga

SEQ ID NO: 7650 - RNA, 19 nt, artificial
  Oligomer
ucuguacgggagaauuugc

SEQ ID NO: 7651 - RNA, 19 nt, artificial
  Oligomer
ucaaauuuaugccacuccu

SEQ ID NO: 7652 - RNA, 19 nt, artificial
  Oligomer
uagaucuucuuacacagca

SEQ ID NO: 7653 - RNA, 19 nt, artificial
  Oligomer
uucaaagaagucaagcaca

SEQ ID NO: 7654 - RNA, 19 nt, artificial
  Oligomer
ucgguuguuggacaggaug

SEQ ID NO: 7655 - RNA, 19 nt, artificial
  Oligomer
uuguccuccaacuccgaaa

SEQ ID NO: 7656 - RNA, 19 nt, artificial
  Oligomer
uccaaacgguccaucaagg

SEQ ID NO: 7657 - RNA, 19 nt, artificial
  Oligomer
ugcacucucaccuuucucu

SEQ ID NO: 7658 - RNA, 19 nt, artificial
  Oligomer
cuaaauagcuccuucucgc

SEQ ID NO: 7659 - RNA, 19 nt, artificial
  Oligomer
ucucuaauaccauuuccac

SEQ ID NO: 7660 - RNA, 19 nt, artificial
  Oligomer
aagucaagcacagucaggg

SEQ ID NO: 7661 - RNA, 19 nt, artificial
  Oligomer
uccuucucgcucaucucag

SEQ ID NO: 7662 - RNA, 19 nt, artificial
  Oligomer
uacgggagaauuugccagg

SEQ ID NO: 7663 - RNA, 19 nt, artificial
  Oligomer
auagucuccugccuuuucu

SEQ ID NO: 7664 - RNA, 19 nt, artificial
  Oligomer
uuguggaagucaauuagag

SEQ ID NO: 7665 - RNA, 19 nt, artificial
  Oligomer
auaccaaagcaacgcaucg

SEQ ID NO: 7666 - RNA, 19 nt, artificial
  Oligomer
ucuuuggcugcuuccuucu

SEQ ID NO: 7667 - RNA, 19 nt, artificial
  Oligomer
uuuucaccuccacacuugu

SEQ ID NO: 7668 - RNA, 19 nt, artificial
  Oligomer
ucaucaugcacugcaauug

SEQ ID NO: 7669 - RNA, 19 nt, artificial
  Oligomer
uucggaugucuucaaucuc

SEQ ID NO: 7670 - RNA, 19 nt, artificial
  Oligomer
auggacuccacaaacaugu

SEQ ID NO: 7671 - RNA, 19 nt, artificial
  Oligomer
uagaaguagggcugcuccu

SEQ ID NO: 7672 - RNA, 19 nt, artificial
  Oligomer
uccagagccugauacacac

SEQ ID NO: 7673 - RNA, 19 nt, artificial
  Oligomer
aaccacuauguuguccucc

SEQ ID NO: 7674 - RNA, 19 nt, artificial
  Oligomer
uagacgggacuuauccucu

SEQ ID NO: 7675 - RNA, 19 nt, artificial
  Oligomer
auaguaguaagcacgaucu

SEQ ID NO: 7676 - RNA, 19 nt, artificial
  Oligomer
auucucagccagaggaucc

SEQ ID NO: 7677 - RNA, 19 nt, artificial
  Oligomer
cugugguuuaggguggugu

SEQ ID NO: 7678 - RNA, 19 nt, artificial
  Oligomer
uccaacuccgaaaucuggg

SEQ ID NO: 7679 - RNA, 19 nt, artificial
  Oligomer
uggacuuauaaucaucaug

SEQ ID NO: 7680 - RNA, 19 nt, artificial
  Oligomer
acucucaccuuucucucug

SEQ ID NO: 7681 - RNA, 19 nt, artificial
  Oligomer
ucacuaagggaaggcagca

SEQ ID NO: 7682 - RNA, 19 nt, artificial
  Oligomer
auggugagcaagauauaag

SEQ ID NO: 7683 - RNA, 19 nt, artificial
  Oligomer
auugccauccuugucagcc

SEQ ID NO: 7684 - RNA, 19 nt, artificial
  Oligomer
uguagcuucuuguguucuc

SEQ ID NO: 7685 - RNA, 19 nt, artificial
  Oligomer
aauugcagguaggucacuc

SEQ ID NO: 7686 - RNA, 19 nt, artificial
  Oligomer
uagucuccugccuuuucuc

SEQ ID NO: 7687 - RNA, 19 nt, artificial
  Oligomer
aacuggucgaggacaaugg

SEQ ID NO: 7688 - RNA, 19 nt, artificial
  Oligomer
uaagagaacaugaaggaga

SEQ ID NO: 7689 - RNA, 19 nt, artificial
  Oligomer
ugaugaacgagacucgaca

SEQ ID NO: 7690 - RNA, 19 nt, artificial
  Oligomer
uuaguaggaccaaaacugg

SEQ ID NO: 7691 - RNA, 19 nt, artificial
  Oligomer
uuguagcuucuuguguucu

SEQ ID NO: 7692 - RNA, 19 nt, artificial
  Oligomer
uuuuuaggaaagagcccga

SEQ ID NO: 7693 - RNA, 19 nt, artificial
  Oligomer
uccagagagaagcagacuc

SEQ ID NO: 7694 - RNA, 19 nt, artificial
  Oligomer
uaguuguugcagacccuga

SEQ ID NO: 7695 - RNA, 19 nt, artificial
  Oligomer
uacuucuugccuucacccu

SEQ ID NO: 7696 - RNA, 19 nt, artificial
  Oligomer
cucuaauaccauuuccacc

SEQ ID NO: 7697 - RNA, 19 nt, artificial
  Oligomer
uugucagccagagagaaca

SEQ ID NO: 7698 - RNA, 19 nt, artificial
  Oligomer
ugugguuuagggugguguu

SEQ ID NO: 7699 - RNA, 19 nt, artificial
  Oligomer
uaaaaucuuugcuucugug

SEQ ID NO: 7700 - RNA, 19 nt, artificial
  Oligomer
uuaaaccagccgucauagc

SEQ ID NO: 7701 - RNA, 19 nt, artificial
  Oligomer
ucaaaugucaguccaagca

SEQ ID NO: 7702 - RNA, 19 nt, artificial
  Oligomer
aauauuuuacagcucagcu

SEQ ID NO: 7703 - RNA, 19 nt, artificial
  Oligomer
uuguacucaaagccuuggg

SEQ ID NO: 7704 - RNA, 19 nt, artificial
  Oligomer
agccauaguaguaagcacg

SEQ ID NO: 7705 - RNA, 19 nt, artificial
  Oligomer
guggucuuuaucuucuuug

SEQ ID NO: 7706 - RNA, 19 nt, artificial
  Oligomer
uggcacuccaucuuuggcu

SEQ ID NO: 7707 - RNA, 19 nt, artificial
  Oligomer
uggaucagagcauagcugc

SEQ ID NO: 7708 - RNA, 19 nt, artificial
  Oligomer
auaguggugcaugaagugg

SEQ ID NO: 7709 - RNA, 19 nt, artificial
  Oligomer
ucuuuuguagcuucuugug

SEQ ID NO: 7710 - RNA, 19 nt, artificial
  Oligomer
cuacuucuugccuucaccc

SEQ ID NO: 7711 - RNA, 19 nt, artificial
  Oligomer
uauagcauggugguccuga

SEQ ID NO: 7712 - RNA, 19 nt, artificial
  Oligomer
uauccagcacagccauugc

SEQ ID NO: 7713 - RNA, 19 nt, artificial
  Oligomer
uucaccuccuggguacugu

SEQ ID NO: 7714 - RNA, 19 nt, artificial
  Oligomer
aucauucacaaagacguug

SEQ ID NO: 7715 - RNA, 19 nt, artificial
  Oligomer
uugcguaaggugaccagcu

SEQ ID NO: 7716 - RNA, 19 nt, artificial
  Oligomer
uggaugaugaugggacugc

SEQ ID NO: 7717 - RNA, 19 nt, artificial
  Oligomer
uuugacacagagcugcgug

SEQ ID NO: 7718 - RNA, 19 nt, artificial
  Oligomer
aucucuaauaccauuucca

SEQ ID NO: 7719 - RNA, 19 nt, artificial
  Oligomer
cuuuguuuccuggugcccu

SEQ ID NO: 7720 - RNA, 19 nt, artificial
  Oligomer
acugagaagauguagacau

SEQ ID NO: 7721 - RNA, 19 nt, artificial
  Oligomer
uaguucuccacgaagcgcu

SEQ ID NO: 7722 - RNA, 19 nt, artificial
  Oligomer
ucccgaauccaguaguugu

SEQ ID NO: 7723 - RNA, 19 nt, artificial
  Oligomer
ucugcaaacacgccaacac

SEQ ID NO: 7724 - RNA, 19 nt, artificial
  Oligomer
uaucacuggugacaucaag

SEQ ID NO: 7725 - RNA, 19 nt, artificial
  Oligomer
uuuuacagcucagcuuuuu

SEQ ID NO: 7726 - RNA, 19 nt, artificial
  Oligomer
aucaagaauaucagggcug

SEQ ID NO: 7727 - RNA, 19 nt, artificial
  Oligomer
cucaaauuuaugccacucc

SEQ ID NO: 7728 - RNA, 19 nt, artificial
  Oligomer
ucuucaaccacuauguugu

SEQ ID NO: 7729 - RNA, 19 nt, artificial
  Oligomer
augaaggaucgcaucaugg

SEQ ID NO: 7730 - RNA, 19 nt, artificial
  Oligomer
uagauguggaaagugggca

SEQ ID NO: 7731 - RNA, 19 nt, artificial
  Oligomer
acauucuuggucauuccug

SEQ ID NO: 7732 - RNA, 19 nt, artificial
  Oligomer
uuuguggaagucaauuaga

SEQ ID NO: 7733 - RNA, 19 nt, artificial
  Oligomer
uaagcaucacagcuucugc

SEQ ID NO: 7734 - RNA, 19 nt, artificial
  Oligomer
auuguagaacauagucucc

SEQ ID NO: 7735 - RNA, 19 nt, artificial
  Oligomer
uccuucuuggagaacagcc

SEQ ID NO: 7736 - RNA, 19 nt, artificial
  Oligomer
augaugggacugcuccucu

SEQ ID NO: 7737 - RNA, 19 nt, artificial
  Oligomer
uuuucugcaggaagcuggg

SEQ ID NO: 7738 - RNA, 19 nt, artificial
  Oligomer
ugaaaauccucccauguca

SEQ ID NO: 7739 - RNA, 19 nt, artificial
  Oligomer
uugcagguaggucacuccu

SEQ ID NO: 7740 - RNA, 19 nt, artificial
  Oligomer
ugcuuccuucuucacgcuc

SEQ ID NO: 7741 - RNA, 19 nt, artificial
  Oligomer
ucuucuuugggagauccug

SEQ ID NO: 7742 - RNA, 19 nt, artificial
  Oligomer
auacaugauggccaggacc

SEQ ID NO: 7743 - RNA, 19 nt, artificial
  Oligomer
uccuuagggaucuugagca

SEQ ID NO: 7744 - RNA, 19 nt, artificial
  Oligomer
auuccugguguucucaaac

SEQ ID NO: 7745 - RNA, 19 nt, artificial
  Oligomer
cuuuuugccaaaccucuuc

SEQ ID NO: 7746 - RNA, 19 nt, artificial
  Oligomer
aucauggugaagaauucgu

SEQ ID NO: 7747 - RNA, 19 nt, artificial
  Oligomer
uugcagacccugagagcuu

SEQ ID NO: 7748 - RNA, 19 nt, artificial
  Oligomer
uucuuggucauuccuggag

SEQ ID NO: 7749 - RNA, 19 nt, artificial
  Oligomer
auuuaguaggaccaaaacu

SEQ ID NO: 7750 - RNA, 19 nt, artificial
  Oligomer
ucgcagauguauagcaugg

SEQ ID NO: 7751 - RNA, 19 nt, artificial
  Oligomer
uagagcaggauguagaggu

SEQ ID NO: 7752 - RNA, 19 nt, artificial
  Oligomer
uacuccuuagggaucuuga

SEQ ID NO: 7753 - RNA, 19 nt, artificial
  Oligomer
uuuggcugcccaaggauga

SEQ ID NO: 7754 - RNA, 19 nt, artificial
  Oligomer
uguagaacauagucuccug

SEQ ID NO: 7755 - RNA, 19 nt, artificial
  Oligomer
cuuugggagauccugacug

SEQ ID NO: 7756 - RNA, 19 nt, artificial
  Oligomer
uaaagagcugaguauggag

SEQ ID NO: 7757 - RNA, 19 nt, artificial
  Oligomer
uuucggaugucuucaaucu

SEQ ID NO: 7758 - RNA, 19 nt, artificial
  Oligomer
uuggagaggaagccauucu

SEQ ID NO: 7759 - RNA, 19 nt, artificial
  Oligomer
uuguaccuuuucaccucca

SEQ ID NO: 7760 - RNA, 19 nt, artificial
  Oligomer
aagauugccacacacacga

SEQ ID NO: 7761 - RNA, 19 nt, artificial
  Oligomer
ucucgaugaaggaucgcau

SEQ ID NO: 7762 - RNA, 19 nt, artificial
  Oligomer
aucacuggugacaucaaga

SEQ ID NO: 7763 - RNA, 19 nt, artificial
  Oligomer
uucucgcucaucucagcca

SEQ ID NO: 7764 - RNA, 19 nt, artificial
  Oligomer
augaaguagaucuucuuac

SEQ ID NO: 7765 - RNA, 19 nt, artificial
  Oligomer
ucauccaggucauacaugg

SEQ ID NO: 7766 - RNA, 19 nt, artificial
  Oligomer
augguaaacauuagacggg

SEQ ID NO: 7767 - RNA, 19 nt, artificial
  Oligomer
uuccuucuucacgcucucu

SEQ ID NO: 7768 - RNA, 19 nt, artificial
  Oligomer
ucuggaagaaccaccaaua

SEQ ID NO: 7769 - RNA, 19 nt, artificial
  Oligomer
aaagagcugaguauggagg

SEQ ID NO: 7770 - RNA, 19 nt, artificial
  Oligomer
gugguguuggguucagaug

SEQ ID NO: 7771 - RNA, 19 nt, artificial
  Oligomer
ucaaccacuauguuguccu

SEQ ID NO: 7772 - RNA, 19 nt, artificial
  Oligomer
cuguacgggagaauuugcc

SEQ ID NO: 7773 - RNA, 19 nt, artificial
  Oligomer
ucggaaagaacaugguagc

SEQ ID NO: 7774 - RNA, 19 nt, artificial
  Oligomer
uguccagguucuaagcauc

SEQ ID NO: 7775 - RNA, 19 nt, artificial
  Oligomer
auuugguagaaaucacauc

SEQ ID NO: 7776 - RNA, 19 nt, artificial
  Oligomer
auugccacacacacgaugu

SEQ ID NO: 7777 - RNA, 19 nt, artificial
  Oligomer
ucauacacagcgauguucu

SEQ ID NO: 7778 - RNA, 19 nt, artificial
  Oligomer
uucucccgaauccaguagu

SEQ ID NO: 7779 - RNA, 19 nt, artificial
  Oligomer
uggugauggcaaaaccagg

SEQ ID NO: 7780 - RNA, 19 nt, artificial
  Oligomer
ucuuggucauuccuggagg

SEQ ID NO: 7781 - RNA, 19 nt, artificial
  Oligomer
ucugaagaagaucuccagg

SEQ ID NO: 7782 - RNA, 19 nt, artificial
  Oligomer
uccucaaaguugcugacac

SEQ ID NO: 7783 - RNA, 19 nt, artificial
  Oligomer
ucagaggccaccacaaauu

SEQ ID NO: 7784 - RNA, 19 nt, artificial
  Oligomer
uguuggguucagaugucuu

SEQ ID NO: 7785 - RNA, 19 nt, artificial
  Oligomer
uucuaagcaucacagcuuc

SEQ ID NO: 7786 - RNA, 19 nt, artificial
  Oligomer
aaauauuuuacagcucagc

SEQ ID NO: 7787 - RNA, 19 nt, artificial
  Oligomer
ucguucuccuccaccucuu

SEQ ID NO: 7788 - RNA, 19 nt, artificial
  Oligomer
acuccgguucagcacuuuc

SEQ ID NO: 7789 - RNA, 19 nt, artificial
  Oligomer
cauaguaguaagcacgauc

SEQ ID NO: 7790 - RNA, 19 nt, artificial
  Oligomer
uuugggagauccugacugg

SEQ ID NO: 7791 - RNA, 19 nt, artificial
  Oligomer
augccagacaaagacauug

SEQ ID NO: 7792 - RNA, 19 nt, artificial
  Oligomer
accauuuccaccuccaccu

SEQ ID NO: 7793 - RNA, 19 nt, artificial
  Oligomer
aaauuuaugccacuccuga

SEQ ID NO: 7794 - RNA, 19 nt, artificial
  Oligomer
acaauggcacugaacaggg

SEQ ID NO: 7795 - RNA, 19 nt, artificial
  Oligomer
uugugguagcggaaccaga

SEQ ID NO: 7796 - RNA, 19 nt, artificial
  Oligomer
uacagcuuuggguauccag

SEQ ID NO: 7797 - RNA, 19 nt, artificial
  Oligomer
uuuggguauccagcacagc

SEQ ID NO: 7798 - RNA, 19 nt, artificial
  Oligomer
acuuguacucaaagccuug

SEQ ID NO: 7799 - RNA, 19 nt, artificial
  Oligomer
auaucuggcagagaggcug

SEQ ID NO: 7800 - RNA, 19 nt, artificial
  Oligomer
ucagguuguuaaaccagcc

SEQ ID NO: 7801 - RNA, 19 nt, artificial
  Oligomer
uuuugccaaaccucuucuu

SEQ ID NO: 7802 - RNA, 19 nt, artificial
  Oligomer
auccagucagaagagcucc

SEQ ID NO: 7803 - RNA, 19 nt, artificial
  Oligomer
auagcugcugcacaaaggc

SEQ ID NO: 7804 - RNA, 19 nt, artificial
  Oligomer
agaagauugccacacacac

SEQ ID NO: 7805 - RNA, 19 nt, artificial
  Oligomer
acucccggaacauagacuc

SEQ ID NO: 7806 - RNA, 19 nt, artificial
  Oligomer
uggucuuuaucuucuuugg

SEQ ID NO: 7807 - RNA, 19 nt, artificial
  Oligomer
ugagaagauguagacauug

SEQ ID NO: 7808 - RNA, 19 nt, artificial
  Oligomer
augaacgagacucgacagc

SEQ ID NO: 7809 - RNA, 19 nt, artificial
  Oligomer
ucaaaaggcacauagcggu

SEQ ID NO: 7810 - RNA, 19 nt, artificial
  Oligomer
uuugaaaacccuuguucag

SEQ ID NO: 7811 - RNA, 19 nt, artificial
  Oligomer
ugcucuacuucuugccuuc

SEQ ID NO: 7812 - RNA, 19 nt, artificial
  Oligomer
cagaucuucaaccacuaug

SEQ ID NO: 7813 - RNA, 19 nt, artificial
  Oligomer
gggaauugagaucgaguac

SEQ ID NO: 7814 - RNA, 19 nt, artificial
  Oligomer
cuucuuacacagcauuugg

SEQ ID NO: 7815 - RNA, 19 nt, artificial
  Oligomer
cuauuguaccuuuucaccu

SEQ ID NO: 7816 - RNA, 19 nt, artificial
  Oligomer
uuaggugcacagaagagaa

SEQ ID NO: 7817 - RNA, 19 nt, artificial
  Oligomer
uauuuaguaggaccaaaac

SEQ ID NO: 7818 - RNA, 19 nt, artificial
  Oligomer
uuccggaaaugacagcugg

SEQ ID NO: 7819 - RNA, 19 nt, artificial
  Oligomer
aagcuuggacccaucauuc

SEQ ID NO: 7820 - RNA, 19 nt, artificial
  Oligomer
aacaugaaggagacgcugg

SEQ ID NO: 7821 - RNA, 19 nt, artificial
  Oligomer
uugaggaaagucucucgca

SEQ ID NO: 7822 - RNA, 19 nt, artificial
  Oligomer
ccuaaauagcuccuucucg

SEQ ID NO: 7823 - RNA, 19 nt, artificial
  Oligomer
acagcuuuggguauccagc

SEQ ID NO: 7824 - RNA, 19 nt, artificial
  Oligomer
auauuuuacagcucagcuu

SEQ ID NO: 7825 - RNA, 19 nt, artificial
  Oligomer
uagaugauugccgggacca

SEQ ID NO: 7826 - RNA, 19 nt, artificial
  Oligomer
uuguccuggaaucccgacu

SEQ ID NO: 7827 - RNA, 19 nt, artificial
  Oligomer
uaucuucuuugggagaucc

SEQ ID NO: 7828 - RNA, 19 nt, artificial
  Oligomer
aagagcccgaugaaaaagg

SEQ ID NO: 7829 - RNA, 19 nt, artificial
  Oligomer
uuguuaaaccagccgucau

SEQ ID NO: 7830 - RNA, 19 nt, artificial
  Oligomer
ucgcaggaagguuaugagg

SEQ ID NO: 7831 - RNA, 19 nt, artificial
  Oligomer
cuugucaccuccauagaug

SEQ ID NO: 7832 - RNA, 19 nt, artificial
  Oligomer
aaagacauugggcugcagg

SEQ ID NO: 7833 - RNA, 19 nt, artificial
  Oligomer
uauaaucaucaugcacugc

SEQ ID NO: 7834 - RNA, 19 nt, artificial
  Oligomer
ucaccuuucucucuggguc

SEQ ID NO: 7835 - RNA, 19 nt, artificial
  Oligomer
cuugggagcuuugaaaacc

SEQ ID NO: 7836 - RNA, 19 nt, artificial
  Oligomer
aaauccucccaugucagcu

SEQ ID NO: 7837 - RNA, 19 nt, artificial
  Oligomer
aaaauggccaggacaacag

SEQ ID NO: 7838 - RNA, 19 nt, artificial
  Oligomer
uugucaccuccauagauga

SEQ ID NO: 7839 - RNA, 19 nt, artificial
  Oligomer
ucaccuccauagaugauug

SEQ ID NO: 7840 - RNA, 19 nt, artificial
  Oligomer
aucuuuguuuccuggugcc

SEQ ID NO: 7841 - RNA, 19 nt, artificial
  Oligomer
acaggccuucucuacauuc

SEQ ID NO: 7842 - RNA, 19 nt, artificial
  Oligomer
uccucuuaaaaucuuugcu

SEQ ID NO: 7843 - RNA, 19 nt, artificial
  Oligomer
cugugcucuacuucuugcc

SEQ ID NO: 7844 - RNA, 19 nt, artificial
  Oligomer
augauggugauggcaaaac

SEQ ID NO: 7845 - RNA, 19 nt, artificial
  Oligomer
uugaguuucuuuuguagcu

SEQ ID NO: 7846 - RNA, 19 nt, artificial
  Oligomer
ugaggaguggucuuuaucu

SEQ ID NO: 7847 - RNA, 19 nt, artificial
  Oligomer
uuuuggagcuggagggaau

SEQ ID NO: 7848 - RNA, 19 nt, artificial
  Oligomer
aaacuggucgaggacaaug

SEQ ID NO: 7849 - RNA, 19 nt, artificial
  Oligomer
augagguugaccugcugca

SEQ ID NO: 7850 - RNA, 19 nt, artificial
  Oligomer
ugucugaagaagaucucca

SEQ ID NO: 7851 - RNA, 19 nt, artificial
  Oligomer
ccuccauagaugauugccg

SEQ ID NO: 7852 - RNA, 19 nt, artificial
  Oligomer
auuuccaccuccaccucca

SEQ ID NO: 7853 - RNA, 19 nt, artificial
  Oligomer
cagccuuccuaaauagcuc

SEQ ID NO: 7854 - RNA, 19 nt, artificial
  Oligomer
ugugcucuacuucuugccu

SEQ ID NO: 7855 - RNA, 19 nt, artificial
  Oligomer
cugggugacauaaaugugc

SEQ ID NO: 7856 - RNA, 19 nt, artificial
  Oligomer
uccacgaagcgcuuguacu

SEQ ID NO: 7857 - RNA, 19 nt, artificial
  Oligomer
aguuguugcagacccugag

SEQ ID NO: 7858 - RNA, 19 nt, artificial
  Oligomer
uugcuucuaggagcuaggg

SEQ ID NO: 7859 - RNA, 19 nt, artificial
  Oligomer
uuaaagagcugaguaugga

SEQ ID NO: 7860 - RNA, 19 nt, artificial
  Oligomer
uggaagucaauuagagaug

SEQ ID NO: 7861 - RNA, 19 nt, artificial
  Oligomer
aaagucucucgcaggaagg

SEQ ID NO: 7862 - RNA, 19 nt, artificial
  Oligomer
aaugacagcuggcauuucu

SEQ ID NO: 7863 - RNA, 19 nt, artificial
  Oligomer
aaguagauguggaaagugg

SEQ ID NO: 7864 - RNA, 19 nt, artificial
  Oligomer
cuucuucacgcucucuuug

SEQ ID NO: 7865 - RNA, 19 nt, artificial
  Oligomer
agagcaaugauggugaugg

SEQ ID NO: 7866 - RNA, 19 nt, artificial
  Oligomer
ugcaucuucucuugcagcg

SEQ ID NO: 7867 - RNA, 19 nt, artificial
  Oligomer
guauccagcacagccauug

SEQ ID NO: 7868 - RNA, 19 nt, artificial
  Oligomer
auagaugauugccgggacc

SEQ ID NO: 7869 - RNA, 19 nt, artificial
  Oligomer
augguagccaaagaagacc

SEQ ID NO: 7870 - RNA, 19 nt, artificial
  Oligomer
auaccauuuccaccuccac

SEQ ID NO: 7871 - RNA, 19 nt, artificial
  Oligomer
ucuucagaacuaaacagca

SEQ ID NO: 7872 - RNA, 19 nt, artificial
  Oligomer
cuuuuuaggaaagagcccg

SEQ ID NO: 7873 - RNA, 19 nt, artificial
  Oligomer
ucuaggaaaggacgguauc

SEQ ID NO: 7874 - RNA, 19 nt, artificial
  Oligomer
uguaccuuuucaccuccac

SEQ ID NO: 7875 - RNA, 19 nt, artificial
  Oligomer
uucuugccuucacccucac

SEQ ID NO: 7876 - RNA, 19 nt, artificial
  Oligomer
uccauagaugauugccggg

SEQ ID NO: 7877 - RNA, 19 nt, artificial
  Oligomer
cgaguacugaauaucuggc

SEQ ID NO: 7878 - RNA, 19 nt, artificial
  Oligomer
ucagccagagagaacaugg

SEQ ID NO: 7879 - RNA, 19 nt, artificial
  Oligomer
aguagauguggaaaguggg

SEQ ID NO: 7880 - RNA, 19 nt, artificial
  Oligomer
aucuucaaccacuauguug

SEQ ID NO: 7881 - RNA, 19 nt, artificial
  Oligomer
ucaagaauaucagggcugg

SEQ ID NO: 7882 - RNA, 19 nt, artificial
  Oligomer
guauaauugucugggucaa

SEQ ID NO: 7883 - RNA, 19 nt, artificial
  Oligomer
cuucuuuccucuuaaaauc

SEQ ID NO: 7884 - RNA, 19 nt, artificial
  Oligomer
guuggguucagaugucuuc

SEQ ID NO: 7885 - RNA, 19 nt, artificial
  Oligomer
uccacugcggcaucaaaag

SEQ ID NO: 7886 - RNA, 19 nt, artificial
  Oligomer
cucaaaugucaguccaagc

SEQ ID NO: 7887 - RNA, 19 nt, artificial
  Oligomer
ugauggagagauugccagc

SEQ ID NO: 7888 - RNA, 19 nt, artificial
  Oligomer
auaaaugugcacagacacc

SEQ ID NO: 7889 - RNA, 19 nt, artificial
  Oligomer
uuggaugaugucagccagc

SEQ ID NO: 7890 - RNA, 19 nt, artificial
  Oligomer
acgaucugcaaacacgcca

SEQ ID NO: 7891 - RNA, 19 nt, artificial
  Oligomer
agucaauuagagauguggg

SEQ ID NO: 7892 - RNA, 19 nt, artificial
  Oligomer
uuuggagcuggagggaaua

SEQ ID NO: 7893 - RNA, 19 nt, artificial
  Oligomer
uccucuucagaacuaaaca

SEQ ID NO: 7894 - RNA, 19 nt, artificial
  Oligomer
ucaugcacugcaauuguag

SEQ ID NO: 7895 - RNA, 19 nt, artificial
  Oligomer
uugccauccuugucagcca

SEQ ID NO: 7896 - RNA, 19 nt, artificial
  Oligomer
uucugguagguggcgauga

SEQ ID NO: 7897 - RNA, 19 nt, artificial
  Oligomer
ucuuggaugaugucagcca

SEQ ID NO: 7898 - RNA, 19 nt, artificial
  Oligomer
auagcgguugaggaaaguc

SEQ ID NO: 7899 - RNA, 19 nt, artificial
  Oligomer
auauucucccaauauuggg

SEQ ID NO: 7900 - RNA, 19 nt, artificial
  Oligomer
uaggaaaggacgguauccu

SEQ ID NO: 7901 - RNA, 19 nt, artificial
  Oligomer
uaggguugagaucacucca

SEQ ID NO: 7902 - RNA, 19 nt, artificial
  Oligomer
cuuuucaccuccacacuug

SEQ ID NO: 7903 - RNA, 19 nt, artificial
  Oligomer
ugaauaucuggcagagagg

SEQ ID NO: 7904 - RNA, 19 nt, artificial
  Oligomer
ugcuucugugcucuacuuc

SEQ ID NO: 7905 - RNA, 19 nt, artificial
  Oligomer
uuccugguguucucaaacc

SEQ ID NO: 7906 - RNA, 19 nt, artificial
  Oligomer
acuaagggaaggcagcaga

SEQ ID NO: 7907 - RNA, 19 nt, artificial
  Oligomer
augugccuccgguaguucu

SEQ ID NO: 7908 - RNA, 19 nt, artificial
  Oligomer
ucuugcguaaggugaccag

SEQ ID NO: 7909 - RNA, 19 nt, artificial
  Oligomer
uccaguagaugcagagagg

SEQ ID NO: 7910 - RNA, 19 nt, artificial
  Oligomer
cuccgguucagcacuuucu

SEQ ID NO: 7911 - RNA, 19 nt, artificial
  Oligomer
uggagaggaagccauucuc

SEQ ID NO: 7912 - RNA, 19 nt, artificial
  Oligomer
uacacagcgauguucuggu

SEQ ID NO: 7913 - RNA, 19 nt, artificial
  Oligomer
aucuucucuugcagcgccu

SEQ ID NO: 7914 - RNA, 19 nt, artificial
  Oligomer
ugaugagcagggcauagag

SEQ ID NO: 7915 - RNA, 19 nt, artificial
  Oligomer
aagaagaucuccaggaugc

SEQ ID NO: 7916 - RNA, 19 nt, artificial
  Oligomer
uucucucuggguccuuggu

SEQ ID NO: 7917 - RNA, 19 nt, artificial
  Oligomer
aaauaggccaccacuccag

SEQ ID NO: 7918 - RNA, 19 nt, artificial
  Oligomer
ugguagccaaagaagaccc

SEQ ID NO: 7919 - RNA, 19 nt, artificial
  Oligomer
ucaaagaagucaagcacag

SEQ ID NO: 7920 - RNA, 19 nt, artificial
  Oligomer
uggcucuugcguaagguga

SEQ ID NO: 7921 - RNA, 19 nt, artificial
  Oligomer
uaccaaagcaacgcaucga

SEQ ID NO: 7922 - RNA, 19 nt, artificial
  Oligomer
gauguagacauugacugcg

SEQ ID NO: 7923 - RNA, 19 nt, artificial
  Oligomer
auuuggcugcccaaggaug

SEQ ID NO: 7924 - RNA, 19 nt, artificial
  Oligomer
uuugaggauggaggcaaag

SEQ ID NO: 7925 - RNA, 19 nt, artificial
  Oligomer
ugaagugaaaauccuccca

SEQ ID NO: 7926 - RNA, 19 nt, artificial
  Oligomer
cugcacucucaccuuucuc

SEQ ID NO: 7927 - RNA, 19 nt, artificial
  Oligomer
ucuugccuucacccucacu

SEQ ID NO: 7928 - RNA, 19 nt, artificial
  Oligomer
agaucacuccaguuccuug

SEQ ID NO: 7929 - RNA, 19 nt, artificial
  Oligomer
agcuggaugaugaugggac

SEQ ID NO: 7930 - RNA, 19 nt, artificial
  Oligomer
acauucuaugucuugaccu

SEQ ID NO: 7931 - RNA, 19 nt, artificial
  Oligomer
ggacuuauaaucaucaugc

SEQ ID NO: 7932 - RNA, 19 nt, artificial
  Oligomer
acucacuaagggaaggcag

SEQ ID NO: 7933 - RNA, 19 nt, artificial
  Oligomer
agaagcacaccugucauac

SEQ ID NO: 7934 - RNA, 19 nt, artificial
  Oligomer
uccuccaacuccgaaaucu

SEQ ID NO: 7935 - RNA, 19 nt, artificial
  Oligomer
cucuucagaacuaaacagc

SEQ ID NO: 7936 - RNA, 19 nt, artificial
  Oligomer
aagaucuccaggaugcguu

SEQ ID NO: 7937 - RNA, 19 nt, artificial
  Oligomer
guagccauugccauccuug

SEQ ID NO: 7938 - RNA, 19 nt, artificial
  Oligomer
uccaguaguuguugcagac

SEQ ID NO: 7939 - RNA, 19 nt, artificial
  Oligomer
aucggagacaagcacuauu

SEQ ID NO: 7940 - RNA, 19 nt, artificial
  Oligomer
ucauucaccuccuggguac

SEQ ID NO: 7941 - RNA, 19 nt, artificial
  Oligomer
aucuucuuacacagcauuu

SEQ ID NO: 7942 - RNA, 19 nt, artificial
  Oligomer
uuggagcuggagggaauag

SEQ ID NO: 7943 - RNA, 19 nt, artificial
  Oligomer
ugaacgagacucgacagcu

SEQ ID NO: 7944 - RNA, 19 nt, artificial
  Oligomer
cuuguacucaaagccuugg

SEQ ID NO: 7945 - RNA, 19 nt, artificial
  Oligomer
agaagcagacucacuaagg

SEQ ID NO: 7946 - RNA, 19 nt, artificial
  Oligomer
ucugacagcagcuggauga

SEQ ID NO: 7947 - RNA, 19 nt, artificial
  Oligomer
uugaagaccaggucuuuga

SEQ ID NO: 7948 - RNA, 19 nt, artificial
  Oligomer
cucagguuguuaaaccagc

SEQ ID NO: 7949 - RNA, 19 nt, artificial
  Oligomer
uuuaugccagacaaagaca

SEQ ID NO: 7950 - RNA, 19 nt, artificial
  Oligomer
aauagcuccuucucgcuca

SEQ ID NO: 7951 - RNA, 19 nt, artificial
  Oligomer
cugacuuguacucaaagcc

SEQ ID NO: 7952 - RNA, 19 nt, artificial
  Oligomer
cuaagcaucacagcuucug

SEQ ID NO: 7953 - RNA, 19 nt, artificial
  Oligomer
uagucuguacgggagaauu

SEQ ID NO: 7954 - RNA, 19 nt, artificial
  Oligomer
aauaccauuuccaccucca

SEQ ID NO: 7955 - RNA, 19 nt, artificial
  Oligomer
ugcggcaucaaaaggcaca

SEQ ID NO: 7956 - RNA, 19 nt, artificial
  Oligomer
aggucuuugaggauggagg

SEQ ID NO: 7957 - RNA, 19 nt, artificial
  Oligomer
auucaccuccuggguacug

SEQ ID NO: 7958 - RNA, 19 nt, artificial
  Oligomer
ugcagggaguugaagaagg

SEQ ID NO: 7959 - RNA, 19 nt, artificial
  Oligomer
aacacgccaacacagaugg

SEQ ID NO: 7960 - RNA, 19 nt, artificial
  Oligomer
ugccagacaaagacauugg

SEQ ID NO: 7961 - RNA, 19 nt, artificial
  Oligomer
cacgucggaaagaacaugg

SEQ ID NO: 7962 - RNA, 19 nt, artificial
  Oligomer
uguacugcugcagcuuuug

SEQ ID NO: 7963 - RNA, 19 nt, artificial
  Oligomer
guagcuucuuguguucucg

SEQ ID NO: 7964 - RNA, 19 nt, artificial
  Oligomer
ucugauggagagauugcca

SEQ ID NO: 7965 - RNA, 19 nt, artificial
  Oligomer
ugguaaaacauguacauga

SEQ ID NO: 7966 - RNA, 19 nt, artificial
  Oligomer
uagccauugccauccuugu

SEQ ID NO: 7967 - RNA, 19 nt, artificial
  Oligomer
aagcacaccugucauaccu

SEQ ID NO: 7968 - RNA, 19 nt, artificial
  Oligomer
ucaccuccacacuugucac

SEQ ID NO: 7969 - RNA, 19 nt, artificial
  Oligomer
cuucuugccuucacccuca

SEQ ID NO: 7970 - RNA, 19 nt, artificial
  Oligomer
uugguagaaaucacaucag

SEQ ID NO: 7971 - RNA, 19 nt, artificial
  Oligomer
auacacagcgauguucugg

SEQ ID NO: 7972 - RNA, 19 nt, artificial
  Oligomer
aaucccucagaucuucaac

SEQ ID NO: 7973 - RNA, 19 nt, artificial
  Oligomer
ucacaagcagggacugucu

SEQ ID NO: 7974 - RNA, 19 nt, artificial
  Oligomer
uccaccuuugacacagagc

SEQ ID NO: 7975 - RNA, 19 nt, artificial
  Oligomer
aaaacccuuguucaggacc

SEQ ID NO: 7976 - RNA, 19 nt, artificial
  Oligomer
caguaguuguugcagaccc

SEQ ID NO: 7977 - RNA, 19 nt, artificial
  Oligomer
uggugguaaaacauguaca

SEQ ID NO: 7978 - RNA, 19 nt, artificial
  Oligomer
aucuuugcuucugugcucu

SEQ ID NO: 7979 - RNA, 19 nt, artificial
  Oligomer
ugccaaaccucuucuucag

SEQ ID NO: 7980 - RNA, 19 nt, artificial
  Oligomer
aauaccaaagcaacgcauc

SEQ ID NO: 7981 - RNA, 19 nt, artificial
  Oligomer
cuuggacccaucauucaca

SEQ ID NO: 7982 - RNA, 19 nt, artificial
  Oligomer
uacaugauggccaggacca

SEQ ID NO: 7983 - RNA, 19 nt, artificial
  Oligomer
uggagcuggagggaauaga

SEQ ID NO: 7984 - RNA, 19 nt, artificial
  Oligomer
aagcaacgcaucgauuuug

SEQ ID NO: 7985 - RNA, 19 nt, artificial
  Oligomer
uaagggaaggcagcagaga

SEQ ID NO: 7986 - RNA, 19 nt, artificial
  Oligomer
auucugauggagagauugc

SEQ ID NO: 7987 - RNA, 19 nt, artificial
  Oligomer
ucuagcugggauagguccu

SEQ ID NO: 7988 - RNA, 19 nt, artificial
  Oligomer
aauguugauaacagcgacc

SEQ ID NO: 7989 - RNA, 19 nt, artificial
  Oligomer
guugcuucuaggagcuagg

SEQ ID NO: 7990 - RNA, 19 nt, artificial
  Oligomer
guaguuguugcagacccug

SEQ ID NO: 7991 - RNA, 19 nt, artificial
  Oligomer
aucacagcuucugcacugg

SEQ ID NO: 7992 - RNA, 19 nt, artificial
  Oligomer
ucuccugccuuuucucauu

SEQ ID NO: 7993 - RNA, 19 nt, artificial
  Oligomer
acccuuguucaggaccuuc

SEQ ID NO: 7994 - RNA, 19 nt, artificial
  Oligomer
ucagccagccacucaaacu

SEQ ID NO: 7995 - RNA, 19 nt, artificial
  Oligomer
uugauaacagcgaccagca

SEQ ID NO: 7996 - RNA, 19 nt, artificial
  Oligomer
augaagaccaccaggaugu

SEQ ID NO: 7997 - RNA, 19 nt, artificial
  Oligomer
uggauuugguagaaaucac

SEQ ID NO: 7998 - RNA, 19 nt, artificial
  Oligomer
aucucgaugaaggaucgca

SEQ ID NO: 7999 - RNA, 19 nt, artificial
  Oligomer
augcggauguugaggaacu

SEQ ID NO: 8000 - RNA, 19 nt, artificial
  Oligomer
aaguugcugacacuuuggg

SEQ ID NO: 8001 - RNA, 19 nt, artificial
  Oligomer
aagacauacaugauggcca

SEQ ID NO: 8002 - RNA, 19 nt, artificial
  Oligomer
ugcaauuguagaacauagu

SEQ ID NO: 8003 - RNA, 19 nt, artificial
  Oligomer
ugacagcuggcauuucuca

SEQ ID NO: 8004 - RNA, 19 nt, artificial
  Oligomer
cuuaaaaucuuugcuucug

SEQ ID NO: 8005 - RNA, 19 nt, artificial
  Oligomer
aggaagguuaugagguugc

SEQ ID NO: 8006 - RNA, 19 nt, artificial
  Oligomer
gguggagcaaguuggcaaa

SEQ ID NO: 8007 - RNA, 19 nt, artificial
  Oligomer
ggagaucagcccuaaugau

SEQ ID NO: 8008 - RNA, 19 nt, artificial
  Oligomer
ggagcaaguuggcaaacag

SEQ ID NO: 8009 - RNA, 19 nt, artificial
  Oligomer
cugggaggugcuacacaau

SEQ ID NO: 8010 - RNA, 19 nt, artificial
  Oligomer
gggagaucagcccuaauga

SEQ ID NO: 8011 - RNA, 19 nt, artificial
  Oligomer
agguggagcaaguuggcaa

SEQ ID NO: 8012 - RNA, 19 nt, artificial
  Oligomer
uaagggaggccauguccaa

SEQ ID NO: 8013 - RNA, 19 nt, artificial
  Oligomer
gggaggugcuacacaaugu

SEQ ID NO: 8014 - RNA, 19 nt, artificial
  Oligomer
uguccaugaugcuuuuaau

SEQ ID NO: 8015 - RNA, 19 nt, artificial
  Oligomer
caugaugccaggucccuaa

SEQ ID NO: 8016 - RNA, 19 nt, artificial
  Oligomer
ccaggucccuaaucaugga

SEQ ID NO: 8017 - RNA, 19 nt, artificial
  Oligomer
cagggagaucagcccuaau

SEQ ID NO: 8018 - RNA, 19 nt, artificial
  Oligomer
ugggcaacucaguuaccua

SEQ ID NO: 8019 - RNA, 19 nt, artificial
  Oligomer
cuguguccaugaugcuuuu

SEQ ID NO: 8020 - RNA, 19 nt, artificial
  Oligomer
gcauuugaccaagccguga

SEQ ID NO: 8021 - RNA, 19 nt, artificial
  Oligomer
auuuccugggcaaggccaa

SEQ ID NO: 8022 - RNA, 19 nt, artificial
  Oligomer
ggaggugcuacacaaugug

SEQ ID NO: 8023 - RNA, 19 nt, artificial
  Oligomer
guccaugaugcuuuuaaua

SEQ ID NO: 8024 - RNA, 19 nt, artificial
  Oligomer
ugaccaaggacaccugcau

SEQ ID NO: 8025 - RNA, 19 nt, artificial
  Oligomer
aaugaugcuguguccauga

SEQ ID NO: 8026 - RNA, 19 nt, artificial
  Oligomer
gagcaaguuggcaaacagg

SEQ ID NO: 8027 - RNA, 19 nt, artificial
  Oligomer
acuuggagcccguggauuu

SEQ ID NO: 8028 - RNA, 19 nt, artificial
  Oligomer
guguccaugaugcuuuuaa

SEQ ID NO: 8029 - RNA, 19 nt, artificial
  Oligomer
cuaaugaugcuguguccau

SEQ ID NO: 8030 - RNA, 19 nt, artificial
  Oligomer
ccuaaugaugcugugucca

SEQ ID NO: 8031 - RNA, 19 nt, artificial
  Oligomer
gaugccaggucccuaauca

SEQ ID NO: 8032 - RNA, 19 nt, artificial
  Oligomer
gcaaguuggcaaacaggcu

SEQ ID NO: 8033 - RNA, 19 nt, artificial
  Oligomer
uggagcaaguuggcaaaca

SEQ ID NO: 8034 - RNA, 19 nt, artificial
  Oligomer
cccuaaugaugcugugucc

SEQ ID NO: 8035 - RNA, 19 nt, artificial
  Oligomer
aggaggcucugucugacuu

SEQ ID NO: 8036 - RNA, 19 nt, artificial
  Oligomer
gaggcucugucugacuucu

SEQ ID NO: 8037 - RNA, 19 nt, artificial
  Oligomer
augccaggucccuaaucau

SEQ ID NO: 8038 - RNA, 19 nt, artificial
  Oligomer
gggcaacucaguuaccuag

SEQ ID NO: 8039 - RNA, 19 nt, artificial
  Oligomer
uggacguccugugugaaga

SEQ ID NO: 8040 - RNA, 19 nt, artificial
  Oligomer
uugaccaagccgugaccaa

SEQ ID NO: 8041 - RNA, 19 nt, artificial
  Oligomer
uaaugaugcuguguccaug

SEQ ID NO: 8042 - RNA, 19 nt, artificial
  Oligomer
accaggagcgaaccaugau

SEQ ID NO: 8043 - RNA, 19 nt, artificial
  Oligomer
agcuugggcaacucaguua

SEQ ID NO: 8044 - RNA, 19 nt, artificial
  Oligomer
cagcccuaaugaugcugug

SEQ ID NO: 8045 - RNA, 19 nt, artificial
  Oligomer
augaugcuguguccaugau

SEQ ID NO: 8046 - RNA, 19 nt, artificial
  Oligomer
gcuguguccaugaugcuuu

SEQ ID NO: 8047 - RNA, 19 nt, artificial
  Oligomer
gagaucagcccuaaugaug

SEQ ID NO: 8048 - RNA, 19 nt, artificial
  Oligomer
gaucagcccuaaugaugcu

SEQ ID NO: 8049 - RNA, 19 nt, artificial
  Oligomer
ugaugcuguguccaugaug

SEQ ID NO: 8050 - RNA, 19 nt, artificial
  Oligomer
ugggaggugcuacacaaug

SEQ ID NO: 8051 - RNA, 19 nt, artificial
  Oligomer
cagcuugggcaacucaguu

SEQ ID NO: 8052 - RNA, 19 nt, artificial
  Oligomer
acuuccagcuggcaagguu

SEQ ID NO: 8053 - RNA, 19 nt, artificial
  Oligomer
gcuugggcaacucaguuac

SEQ ID NO: 8054 - RNA, 19 nt, artificial
  Oligomer
ugugugaagagcccgaugu

SEQ ID NO: 8055 - RNA, 19 nt, artificial
  Oligomer
aguuggcaaacaggcuccu

SEQ ID NO: 8056 - RNA, 19 nt, artificial
  Oligomer
cauuugaccaagccgugac

SEQ ID NO: 8057 - RNA, 19 nt, artificial
  Oligomer
uuggcaaacaggcuccucu

SEQ ID NO: 8058 - RNA, 19 nt, artificial
  Oligomer
gaugcuguguccaugaugc

SEQ ID NO: 8059 - RNA, 19 nt, artificial
  Oligomer
cucugucugacuucuggcu

SEQ ID NO: 8060 - RNA, 19 nt, artificial
  Oligomer
ggucccuaaucauggacuc

SEQ ID NO: 8061 - RNA, 19 nt, artificial
  Oligomer
gaggugcuacacaaugugg

SEQ ID NO: 8062 - RNA, 19 nt, artificial
  Oligomer
caaguuggcaaacaggcuc

SEQ ID NO: 8063 - RNA, 19 nt, artificial
  Oligomer
augaugccaggucccuaau

SEQ ID NO: 8064 - RNA, 19 nt, artificial
  Oligomer
ucgaugcagagacagaggu

SEQ ID NO: 8065 - RNA, 19 nt, artificial
  Oligomer
aggcucugucugacuucug

SEQ ID NO: 8066 - RNA, 19 nt, artificial
  Oligomer
guggagcaaguuggcaaac

SEQ ID NO: 8067 - RNA, 19 nt, artificial
  Oligomer
agaucagcccuaaugaugc

SEQ ID NO: 8068 - RNA, 19 nt, artificial
  Oligomer
gcccuaaugaugcuguguc

SEQ ID NO: 8069 - RNA, 19 nt, artificial
  Oligomer
uguguccaugaugcuuuua

SEQ ID NO: 8070 - RNA, 19 nt, artificial
  Oligomer
gcaacucaguuaccuagcc

SEQ ID NO: 8071 - RNA, 19 nt, artificial
  Oligomer
agggagaucagcccuaaug

SEQ ID NO: 8072 - RNA, 19 nt, artificial
  Oligomer
ggcaacucaguuaccuagc

SEQ ID NO: 8073 - RNA, 19 nt, artificial
  Oligomer
ugccaggucccuaaucaug

SEQ ID NO: 8074 - RNA, 19 nt, artificial
  Oligomer
aggucccuaaucauggacu

SEQ ID NO: 8075 - RNA, 19 nt, artificial
  Oligomer
gugcuacacaauguggcgu

SEQ ID NO: 8076 - RNA, 19 nt, artificial
  Oligomer
cuugggcaacucaguuacc

SEQ ID NO: 8077 - RNA, 19 nt, artificial
  Oligomer
agcccuaaugaugcugugu

SEQ ID NO: 8078 - RNA, 19 nt, artificial
  Oligomer
ugcuguguccaugaugcuu

SEQ ID NO: 8079 - RNA, 19 nt, artificial
  Oligomer
agcaaguuggcaaacaggc

SEQ ID NO: 8080 - RNA, 19 nt, artificial
  Oligomer
aggugcuacacaauguggc

SEQ ID NO: 8081 - RNA, 19 nt, artificial
  Oligomer
ugaugccaggucccuaauc

SEQ ID NO: 8082 - RNA, 19 nt, artificial
  Oligomer
augcuguguccaugaugcu

SEQ ID NO: 8083 - RNA, 19 nt, artificial
  Oligomer
aaguuggcaaacaggcucc

SEQ ID NO: 8084 - RNA, 19 nt, artificial
  Oligomer
uugggcaacucaguuaccu

SEQ ID NO: 8085 - RNA, 19 nt, artificial
  Oligomer
ucagcccuaaugaugcugu

SEQ ID NO: 8086 - RNA, 19 nt, artificial
  Oligomer
caacucaguuaccuagccc

SEQ ID NO: 8087 - RNA, 19 nt, artificial
  Oligomer
caggucccuaaucauggac

SEQ ID NO: 8088 - RNA, 19 nt, artificial
  Oligomer
ucugucugacuucuggcug

SEQ ID NO: 8089 - RNA, 19 nt, artificial
  Oligomer
uuugaccaagccgugacca

SEQ ID NO: 8090 - RNA, 19 nt, artificial
  Oligomer
aacuuccagcuggcaaggu

SEQ ID NO: 8091 - RNA, 19 nt, artificial
  Oligomer
auuugaccaagccgugacc

SEQ ID NO: 8092 - RNA, 19 nt, artificial
  Oligomer
ugcuacacaauguggcguc

SEQ ID NO: 8093 - RNA, 19 nt, artificial
  Oligomer
gucccuaaucauggacucc

SEQ ID NO: 8094 - RNA, 19 nt, artificial
  Oligomer
ucccuaaucauggacuccc

SEQ ID NO: 8095 - RNA, 19 nt, artificial
  Oligomer
aucagcccuaaugaugcug

SEQ ID NO: 8096 - RNA, 19 nt, artificial
  Oligomer
uuugccaacuugcuccacc

SEQ ID NO: 8097 - RNA, 19 nt, artificial
  Oligomer
aucauuagggcugaucucc

SEQ ID NO: 8098 - RNA, 19 nt, artificial
  Oligomer
cuguuugccaacuugcucc

SEQ ID NO: 8099 - RNA, 19 nt, artificial
  Oligomer
auuguguagcaccucccag

SEQ ID NO: 8100 - RNA, 19 nt, artificial
  Oligomer
ucauuagggcugaucuccc

SEQ ID NO: 8101 - RNA, 19 nt, artificial
  Oligomer
uugccaacuugcuccaccu

SEQ ID NO: 8102 - RNA, 19 nt, artificial
  Oligomer
uuggacauggccucccuua

SEQ ID NO: 8103 - RNA, 19 nt, artificial
  Oligomer
acauuguguagcaccuccc

SEQ ID NO: 8104 - RNA, 19 nt, artificial
  Oligomer
auuaaaagcaucauggaca

SEQ ID NO: 8105 - RNA, 19 nt, artificial
  Oligomer
uuagggaccuggcaucaug

SEQ ID NO: 8106 - RNA, 19 nt, artificial
  Oligomer
uccaugauuagggaccugg

SEQ ID NO: 8107 - RNA, 19 nt, artificial
  Oligomer
auuagggcugaucucccug

SEQ ID NO: 8108 - RNA, 19 nt, artificial
  Oligomer
uagguaacugaguugccca

SEQ ID NO: 8109 - RNA, 19 nt, artificial
  Oligomer
aaaagcaucauggacacag

SEQ ID NO: 8110 - RNA, 19 nt, artificial
  Oligomer
ucacggcuuggucaaaugc

SEQ ID NO: 8111 - RNA, 19 nt, artificial
  Oligomer
uuggccuugcccaggaaau

SEQ ID NO: 8112 - RNA, 19 nt, artificial
  Oligomer
cacauuguguagcaccucc

SEQ ID NO: 8113 - RNA, 19 nt, artificial
  Oligomer
uauuaaaagcaucauggac

SEQ ID NO: 8114 - RNA, 19 nt, artificial
  Oligomer
augcagguguccuugguca

SEQ ID NO: 8115 - RNA, 19 nt, artificial
  Oligomer
ucauggacacagcaucauu

SEQ ID NO: 8116 - RNA, 19 nt, artificial
  Oligomer
ccuguuugccaacuugcuc

SEQ ID NO: 8117 - RNA, 19 nt, artificial
  Oligomer
aaauccacgggcuccaagu

SEQ ID NO: 8118 - RNA, 19 nt, artificial
  Oligomer
uuaaaagcaucauggacac

SEQ ID NO: 8119 - RNA, 19 nt, artificial
  Oligomer
auggacacagcaucauuag

SEQ ID NO: 8120 - RNA, 19 nt, artificial
  Oligomer
uggacacagcaucauuagg

SEQ ID NO: 8121 - RNA, 19 nt, artificial
  Oligomer
ugauuagggaccuggcauc

SEQ ID NO: 8122 - RNA, 19 nt, artificial
  Oligomer
agccuguuugccaacuugc

SEQ ID NO: 8123 - RNA, 19 nt, artificial
  Oligomer
uguuugccaacuugcucca

SEQ ID NO: 8124 - RNA, 19 nt, artificial
  Oligomer
ggacacagcaucauuaggg

SEQ ID NO: 8125 - RNA, 19 nt, artificial
  Oligomer
aagucagacagagccuccu

SEQ ID NO: 8126 - RNA, 19 nt, artificial
  Oligomer
agaagucagacagagccuc

SEQ ID NO: 8127 - RNA, 19 nt, artificial
  Oligomer
augauuagggaccuggcau

SEQ ID NO: 8128 - RNA, 19 nt, artificial
  Oligomer
cuagguaacugaguugccc

SEQ ID NO: 8129 - RNA, 19 nt, artificial
  Oligomer
ucuucacacaggacgucca

SEQ ID NO: 8130 - RNA, 19 nt, artificial
  Oligomer
uuggucacggcuuggucaa

SEQ ID NO: 8131 - RNA, 19 nt, artificial
  Oligomer
cauggacacagcaucauua

SEQ ID NO: 8132 - RNA, 19 nt, artificial
  Oligomer
aucaugguucgcuccuggu

SEQ ID NO: 8133 - RNA, 19 nt, artificial
  Oligomer
uaacugaguugcccaagcu

SEQ ID NO: 8134 - RNA, 19 nt, artificial
  Oligomer
cacagcaucauuagggcug

SEQ ID NO: 8135 - RNA, 19 nt, artificial
  Oligomer
aucauggacacagcaucau

SEQ ID NO: 8136 - RNA, 19 nt, artificial
  Oligomer
aaagcaucauggacacagc

SEQ ID NO: 8137 - RNA, 19 nt, artificial
  Oligomer
caucauuagggcugaucuc

SEQ ID NO: 8138 - RNA, 19 nt, artificial
  Oligomer
agcaucauuagggcugauc

SEQ ID NO: 8139 - RNA, 19 nt, artificial
  Oligomer
caucauggacacagcauca

SEQ ID NO: 8140 - RNA, 19 nt, artificial
  Oligomer
cauuguguagcaccuccca

SEQ ID NO: 8141 - RNA, 19 nt, artificial
  Oligomer
aacugaguugcccaagcug

SEQ ID NO: 8142 - RNA, 19 nt, artificial
  Oligomer
aaccuugccagcuggaagu

SEQ ID NO: 8143 - RNA, 19 nt, artificial
  Oligomer
guaacugaguugcccaagc

SEQ ID NO: 8144 - RNA, 19 nt, artificial
  Oligomer
acaucgggcucuucacaca

SEQ ID NO: 8145 - RNA, 19 nt, artificial
  Oligomer
aggagccuguuugccaacu

SEQ ID NO: 8146 - RNA, 19 nt, artificial
  Oligomer
gucacggcuuggucaaaug

SEQ ID NO: 8147 - RNA, 19 nt, artificial
  Oligomer
agaggagccuguuugccaa

SEQ ID NO: 8148 - RNA, 19 nt, artificial
  Oligomer
gcaucauggacacagcauc

SEQ ID NO: 8149 - RNA, 19 nt, artificial
  Oligomer
agccagaagucagacagag

SEQ ID NO: 8150 - RNA, 19 nt, artificial
  Oligomer
gaguccaugauuagggacc

SEQ ID NO: 8151 - RNA, 19 nt, artificial
  Oligomer
ccacauuguguagcaccuc

SEQ ID NO: 8152 - RNA, 19 nt, artificial
  Oligomer
gagccuguuugccaacuug

SEQ ID NO: 8153 - RNA, 19 nt, artificial
  Oligomer
auuagggaccuggcaucau

SEQ ID NO: 8154 - RNA, 19 nt, artificial
  Oligomer
accucugucucugcaucga

SEQ ID NO: 8155 - RNA, 19 nt, artificial
  Oligomer
cagaagucagacagagccu

SEQ ID NO: 8156 - RNA, 19 nt, artificial
  Oligomer
guuugccaacuugcuccac

SEQ ID NO: 8157 - RNA, 19 nt, artificial
  Oligomer
gcaucauuagggcugaucu

SEQ ID NO: 8158 - RNA, 19 nt, artificial
  Oligomer
gacacagcaucauuagggc

SEQ ID NO: 8159 - RNA, 19 nt, artificial
  Oligomer
uaaaagcaucauggacaca

SEQ ID NO: 8160 - RNA, 19 nt, artificial
  Oligomer
ggcuagguaacugaguugc

SEQ ID NO: 8161 - RNA, 19 nt, artificial
  Oligomer
cauuagggcugaucucccu

SEQ ID NO: 8162 - RNA, 19 nt, artificial
  Oligomer
gcuagguaacugaguugcc

SEQ ID NO: 8163 - RNA, 19 nt, artificial
  Oligomer
caugauuagggaccuggca

SEQ ID NO: 8164 - RNA, 19 nt, artificial
  Oligomer
aguccaugauuagggaccu

SEQ ID NO: 8165 - RNA, 19 nt, artificial
  Oligomer
acgccacauuguguagcac

SEQ ID NO: 8166 - RNA, 19 nt, artificial
  Oligomer
gguaacugaguugcccaag

SEQ ID NO: 8167 - RNA, 19 nt, artificial
  Oligomer
acacagcaucauuagggcu

SEQ ID NO: 8168 - RNA, 19 nt, artificial
  Oligomer
aagcaucauggacacagca

SEQ ID NO: 8169 - RNA, 19 nt, artificial
  Oligomer
gccuguuugccaacuugcu

SEQ ID NO: 8170 - RNA, 19 nt, artificial
  Oligomer
gccacauuguguagcaccu

SEQ ID NO: 8171 - RNA, 19 nt, artificial
  Oligomer
gauuagggaccuggcauca

SEQ ID NO: 8172 - RNA, 19 nt, artificial
  Oligomer
agcaucauggacacagcau

SEQ ID NO: 8173 - RNA, 19 nt, artificial
  Oligomer
ggagccuguuugccaacuu

SEQ ID NO: 8174 - RNA, 19 nt, artificial
  Oligomer
agguaacugaguugcccaa

SEQ ID NO: 8175 - RNA, 19 nt, artificial
  Oligomer
acagcaucauuagggcuga

SEQ ID NO: 8176 - RNA, 19 nt, artificial
  Oligomer
gggcuagguaacugaguug

SEQ ID NO: 8177 - RNA, 19 nt, artificial
  Oligomer
guccaugauuagggaccug

SEQ ID NO: 8178 - RNA, 19 nt, artificial
  Oligomer
cagccagaagucagacaga

SEQ ID NO: 8179 - RNA, 19 nt, artificial
  Oligomer
uggucacggcuuggucaaa

SEQ ID NO: 8180 - RNA, 19 nt, artificial
  Oligomer
accuugccagcuggaaguu

SEQ ID NO: 8181 - RNA, 19 nt, artificial
  Oligomer
ggucacggcuuggucaaau

SEQ ID NO: 8182 - RNA, 19 nt, artificial
  Oligomer
gacgccacauuguguagca

SEQ ID NO: 8183 - RNA, 19 nt, artificial
  Oligomer
ggaguccaugauuagggac

SEQ ID NO: 8184 - RNA, 19 nt, artificial
  Oligomer
gggaguccaugauuaggga

SEQ ID NO: 8185 - RNA, 19 nt, artificial
  Oligomer
cagcaucauuagggcugau

SEQ ID NO: 8186 - RNA, 19 nt, artificial
  Oligomer
gcguguuggaaacgucaga

SEQ ID NO: 8187 - RNA, 19 nt, artificial
  Oligomer
acgaauucaggcagcucaa

SEQ ID NO: 8188 - RNA, 19 nt, artificial
  Oligomer
gcagcuguuggaaaccuau

SEQ ID NO: 8189 - RNA, 19 nt, artificial
  Oligomer
cagaucaagaggcuccaaa

SEQ ID NO: 8190 - RNA, 19 nt, artificial
  Oligomer
gcagaucaagaggcuccaa

SEQ ID NO: 8191 - RNA, 19 nt, artificial
  Oligomer
cgacgaucacuggcuucuu

SEQ ID NO: 8192 - RNA, 19 nt, artificial
  Oligomer
gacgaauucaggcagcuca

SEQ ID NO: 8193 - RNA, 19 nt, artificial
  Oligomer
ggaguugggacgaauucag

SEQ ID NO: 8194 - RNA, 19 nt, artificial
  Oligomer
agaucaagaggcuccaaac

SEQ ID NO: 8195 - RNA, 19 nt, artificial
  Oligomer
aggaguugggacgaauuca

SEQ ID NO: 8196 - RNA, 19 nt, artificial
  Oligomer
ugcagcuguuggaaaccua

SEQ ID NO: 8197 - RNA, 19 nt, artificial
  Oligomer
ugcagaucaagaggcucca

SEQ ID NO: 8198 - RNA, 19 nt, artificial
  Oligomer
gcguucucccaaagcuucu

SEQ ID NO: 8199 - RNA, 19 nt, artificial
  Oligomer
cgaauucaggcagcucaag

SEQ ID NO: 8200 - RNA, 19 nt, artificial
  Oligomer
gaguugggacgaauucagg

SEQ ID NO: 8201 - RNA, 19 nt, artificial
  Oligomer
ccaaacguuugccuucucu

SEQ ID NO: 8202 - RNA, 19 nt, artificial
  Oligomer
guugggacgaauucaggca

SEQ ID NO: 8203 - RNA, 19 nt, artificial
  Oligomer
agaggagcagccucuuucu

SEQ ID NO: 8204 - RNA, 19 nt, artificial
  Oligomer
cagcuguuggaaaccuauu

SEQ ID NO: 8205 - RNA, 19 nt, artificial
  Oligomer
cccgauacccaguuucagu

SEQ ID NO: 8206 - RNA, 19 nt, artificial
  Oligomer
gcuguuggaaaccuauucu

SEQ ID NO: 8207 - RNA, 19 nt, artificial
  Oligomer
auacccaguuucagugcaa

SEQ ID NO: 8208 - RNA, 19 nt, artificial
  Oligomer
caaacguuugccuucucug

SEQ ID NO: 8209 - RNA, 19 nt, artificial
  Oligomer
uggugcagaucaagaggcu

SEQ ID NO: 8210 - RNA, 19 nt, artificial
  Oligomer
ggcuccaaacguuugccuu

SEQ ID NO: 8211 - RNA, 19 nt, artificial
  Oligomer
caggaguugggacgaauuc

SEQ ID NO: 8212 - RNA, 19 nt, artificial
  Oligomer
gcuccaaacguuugccuuc

SEQ ID NO: 8213 - RNA, 19 nt, artificial
  Oligomer
uuggaaaccuauucucgga

SEQ ID NO: 8214 - RNA, 19 nt, artificial
  Oligomer
guuggaaaccuauucucgg

SEQ ID NO: 8215 - RNA, 19 nt, artificial
  Oligomer
cguguuggaaacgucagac

SEQ ID NO: 8216 - RNA, 19 nt, artificial
  Oligomer
gauacccaguuucagugca

SEQ ID NO: 8217 - RNA, 19 nt, artificial
  Oligomer
gaucacuggcuucuucgca

SEQ ID NO: 8218 - RNA, 19 nt, artificial
  Oligomer
agacccucaaggagaccuu

SEQ ID NO: 8219 - RNA, 19 nt, artificial
  Oligomer
ucuccauccacagucugga

SEQ ID NO: 8220 - RNA, 19 nt, artificial
  Oligomer
auaggccuuuucaggcgca

SEQ ID NO: 8221 - RNA, 19 nt, artificial
  Oligomer
cuccaaacguuugccuucu

SEQ ID NO: 8222 - RNA, 19 nt, artificial
  Oligomer
aguugggacgaauucaggc

SEQ ID NO: 8223 - RNA, 19 nt, artificial
  Oligomer
agcuguuggaaaccuauuc

SEQ ID NO: 8224 - RNA, 19 nt, artificial
  Oligomer
cguucucccaaagcuucuc

SEQ ID NO: 8225 - RNA, 19 nt, artificial
  Oligomer
cuguuggaaaccuauucuc

SEQ ID NO: 8226 - RNA, 19 nt, artificial
  Oligomer
aagaggcuccaaacguuug

SEQ ID NO: 8227 - RNA, 19 nt, artificial
  Oligomer
cgauacccaguuucagugc

SEQ ID NO: 8228 - RNA, 19 nt, artificial
  Oligomer
agaggcuccaaacguuugc

SEQ ID NO: 8229 - RNA, 19 nt, artificial
  Oligomer
aucaagaggcuccaaacgu

SEQ ID NO: 8230 - RNA, 19 nt, artificial
  Oligomer
ggaaaccuauucucggagg

SEQ ID NO: 8231 - RNA, 19 nt, artificial
  Oligomer
ccgauacccaguuucagug

SEQ ID NO: 8232 - RNA, 19 nt, artificial
  Oligomer
guguuggaaacgucagacc

SEQ ID NO: 8233 - RNA, 19 nt, artificial
  Oligomer
uugggacgaauucaggcag

SEQ ID NO: 8234 - RNA, 19 nt, artificial
  Oligomer
uacccaguuucagugcaag

SEQ ID NO: 8235 - RNA, 19 nt, artificial
  Oligomer
uggaaaccuauucucggag

SEQ ID NO: 8236 - RNA, 19 nt, artificial
  Oligomer
acgaucacuggcuucuucg

SEQ ID NO: 8237 - RNA, 19 nt, artificial
  Oligomer
uccaaacguuugccuucuc

SEQ ID NO: 8238 - RNA, 19 nt, artificial
  Oligomer
aacguuugccuucucugug

SEQ ID NO: 8239 - RNA, 19 nt, artificial
  Oligomer
uguuggaaaccuauucucg

SEQ ID NO: 8240 - RNA, 19 nt, artificial
  Oligomer
uguuggaaacgucagaccg

SEQ ID NO: 8241 - RNA, 19 nt, artificial
  Oligomer
aucacuggcuucuucgcac

SEQ ID NO: 8242 - RNA, 19 nt, artificial
  Oligomer
gaaaccuauucucggaggc

SEQ ID NO: 8243 - RNA, 19 nt, artificial
  Oligomer
acguuugccuucucugugc

SEQ ID NO: 8244 - RNA, 19 nt, artificial
  Oligomer
aggcuccaaacguuugccu

SEQ ID NO: 8245 - RNA, 19 nt, artificial
  Oligomer
acccaguuucagugcaagg

SEQ ID NO: 8246 - RNA, 19 nt, artificial
  Oligomer
aaaccuauucucggaggcu

SEQ ID NO: 8247 - RNA, 19 nt, artificial
  Oligomer
cugcagcuguuggaaaccu

SEQ ID NO: 8248 - RNA, 19 nt, artificial
  Oligomer
aaccuauucucggaggcug

SEQ ID NO: 8249 - RNA, 19 nt, artificial
  Oligomer
guucucccaaagcuucucg

SEQ ID NO: 8250 - RNA, 19 nt, artificial
  Oligomer
uuugccuucucugugcgcu

SEQ ID NO: 8251 - RNA, 19 nt, artificial
  Oligomer
aagacccucaaggagaccu

SEQ ID NO: 8252 - RNA, 19 nt, artificial
  Oligomer
ucugacguuuccaacacgc

SEQ ID NO: 8253 - RNA, 19 nt, artificial
  Oligomer
uugagcugccugaauucgu

SEQ ID NO: 8254 - RNA, 19 nt, artificial
  Oligomer
auagguuuccaacagcugc

SEQ ID NO: 8255 - RNA, 19 nt, artificial
  Oligomer
uuuggagccucuugaucug

SEQ ID NO: 8256 - RNA, 19 nt, artificial
  Oligomer
uuggagccucuugaucugc

SEQ ID NO: 8257 - RNA, 19 nt, artificial
  Oligomer
aagaagccagugaucgucg

SEQ ID NO: 8258 - RNA, 19 nt, artificial
  Oligomer
ugagcugccugaauucguc

SEQ ID NO: 8259 - RNA, 19 nt, artificial
  Oligomer
cugaauucgucccaacucc

SEQ ID NO: 8260 - RNA, 19 nt, artificial
  Oligomer
guuuggagccucuugaucu

SEQ ID NO: 8261 - RNA, 19 nt, artificial
  Oligomer
ugaauucgucccaacuccu

SEQ ID NO: 8262 - RNA, 19 nt, artificial
  Oligomer
uagguuuccaacagcugca

SEQ ID NO: 8263 - RNA, 19 nt, artificial
  Oligomer
uggagccucuugaucugca

SEQ ID NO: 8264 - RNA, 19 nt, artificial
  Oligomer
agaagcuuugggagaacgc

SEQ ID NO: 8265 - RNA, 19 nt, artificial
  Oligomer
cuugagcugccugaauucg

SEQ ID NO: 8266 - RNA, 19 nt, artificial
  Oligomer
ccugaauucgucccaacuc

SEQ ID NO: 8267 - RNA, 19 nt, artificial
  Oligomer
agagaaggcaaacguuugg

SEQ ID NO: 8268 - RNA, 19 nt, artificial
  Oligomer
ugccugaauucgucccaac

SEQ ID NO: 8269 - RNA, 19 nt, artificial
  Oligomer
agaaagaggcugcuccucu

SEQ ID NO: 8270 - RNA, 19 nt, artificial
  Oligomer
aauagguuuccaacagcug

SEQ ID NO: 8271 - RNA, 19 nt, artificial
  Oligomer
acugaaacuggguaucggg

SEQ ID NO: 8272 - RNA, 19 nt, artificial
  Oligomer
agaauagguuuccaacagc

SEQ ID NO: 8273 - RNA, 19 nt, artificial
  Oligomer
uugcacugaaacuggguau

SEQ ID NO: 8274 - RNA, 19 nt, artificial
  Oligomer
cagagaaggcaaacguuug

SEQ ID NO: 8275 - RNA, 19 nt, artificial
  Oligomer
agccucuugaucugcacca

SEQ ID NO: 8276 - RNA, 19 nt, artificial
  Oligomer
aaggcaaacguuuggagcc

SEQ ID NO: 8277 - RNA, 19 nt, artificial
  Oligomer
gaauucgucccaacuccug

SEQ ID NO: 8278 - RNA, 19 nt, artificial
  Oligomer
gaaggcaaacguuuggagc

SEQ ID NO: 8279 - RNA, 19 nt, artificial
  Oligomer
uccgagaauagguuuccaa

SEQ ID NO: 8280 - RNA, 19 nt, artificial
  Oligomer
ccgagaauagguuuccaac

SEQ ID NO: 8281 - RNA, 19 nt, artificial
  Oligomer
gucugacguuuccaacacg

SEQ ID NO: 8282 - RNA, 19 nt, artificial
  Oligomer
ugcacugaaacuggguauc

SEQ ID NO: 8283 - RNA, 19 nt, artificial
  Oligomer
ugcgaagaagccagugauc

SEQ ID NO: 8284 - RNA, 19 nt, artificial
  Oligomer
aaggucuccuugagggucu

SEQ ID NO: 8285 - RNA, 19 nt, artificial
  Oligomer
uccagacuguggauggaga

SEQ ID NO: 8286 - RNA, 19 nt, artificial
  Oligomer
ugcgccugaaaaggccuau

SEQ ID NO: 8287 - RNA, 19 nt, artificial
  Oligomer
agaaggcaaacguuuggag

SEQ ID NO: 8288 - RNA, 19 nt, artificial
  Oligomer
gccugaauucgucccaacu

SEQ ID NO: 8289 - RNA, 19 nt, artificial
  Oligomer
gaauagguuuccaacagcu

SEQ ID NO: 8290 - RNA, 19 nt, artificial
  Oligomer
gagaagcuuugggagaacg

SEQ ID NO: 8291 - RNA, 19 nt, artificial
  Oligomer
gagaauagguuuccaacag

SEQ ID NO: 8292 - RNA, 19 nt, artificial
  Oligomer
caaacguuuggagccucuu

SEQ ID NO: 8293 - RNA, 19 nt, artificial
  Oligomer
gcacugaaacuggguaucg

SEQ ID NO: 8294 - RNA, 19 nt, artificial
  Oligomer
gcaaacguuuggagccucu

SEQ ID NO: 8295 - RNA, 19 nt, artificial
  Oligomer
acguuuggagccucuugau

SEQ ID NO: 8296 - RNA, 19 nt, artificial
  Oligomer
ccuccgagaauagguuucc

SEQ ID NO: 8297 - RNA, 19 nt, artificial
  Oligomer
cacugaaacuggguaucgg

SEQ ID NO: 8298 - RNA, 19 nt, artificial
  Oligomer
ggucugacguuuccaacac

SEQ ID NO: 8299 - RNA, 19 nt, artificial
  Oligomer
cugccugaauucgucccaa

SEQ ID NO: 8300 - RNA, 19 nt, artificial
  Oligomer
cuugcacugaaacugggua

SEQ ID NO: 8301 - RNA, 19 nt, artificial
  Oligomer
cuccgagaauagguuucca

SEQ ID NO: 8302 - RNA, 19 nt, artificial
  Oligomer
cgaagaagccagugaucgu

SEQ ID NO: 8303 - RNA, 19 nt, artificial
  Oligomer
gagaaggcaaacguuugga

SEQ ID NO: 8304 - RNA, 19 nt, artificial
  Oligomer
cacagagaaggcaaacguu

SEQ ID NO: 8305 - RNA, 19 nt, artificial
  Oligomer
cgagaauagguuuccaaca

SEQ ID NO: 8306 - RNA, 19 nt, artificial
  Oligomer
cggucugacguuuccaaca

SEQ ID NO: 8307 - RNA, 19 nt, artificial
  Oligomer
gugcgaagaagccagugau

SEQ ID NO: 8308 - RNA, 19 nt, artificial
  Oligomer
gccuccgagaauagguuuc

SEQ ID NO: 8309 - RNA, 19 nt, artificial
  Oligomer
gcacagagaaggcaaacgu

SEQ ID NO: 8310 - RNA, 19 nt, artificial
  Oligomer
aggcaaacguuuggagccu

SEQ ID NO: 8311 - RNA, 19 nt, artificial
  Oligomer
ccuugcacugaaacugggu

SEQ ID NO: 8312 - RNA, 19 nt, artificial
  Oligomer
agccuccgagaauagguuu

SEQ ID NO: 8313 - RNA, 19 nt, artificial
  Oligomer
agguuuccaacagcugcag

SEQ ID NO: 8314 - RNA, 19 nt, artificial
  Oligomer
cagccuccgagaauagguu

SEQ ID NO: 8315 - RNA, 19 nt, artificial
  Oligomer
cgagaagcuuugggagaac

SEQ ID NO: 8316 - RNA, 19 nt, artificial
  Oligomer
agcgcacagagaaggcaaa

SEQ ID NO: 8317 - RNA, 19 nt, artificial
  Oligomer
aggucuccuugagggucuu

SEQ ID NO: 8318 - RNA, 19 nt, artificial
  Oligomer
gcuuuuugcuggcauuuaa

SEQ ID NO: 8319 - RNA, 19 nt, artificial
  Oligomer
gauugugccaaacaaaaaa

SEQ ID NO: 8320 - RNA, 19 nt, artificial
  Oligomer
gggucaagagcauaaggau

SEQ ID NO: 8321 - RNA, 19 nt, artificial
  Oligomer
uggacagaaggaauggaaa

SEQ ID NO: 8322 - RNA, 19 nt, artificial
  Oligomer
ccuccucuugcauuuuaaa

SEQ ID NO: 8323 - RNA, 19 nt, artificial
  Oligomer
cccuccucuugcauuuuaa

SEQ ID NO: 8324 - RNA, 19 nt, artificial
  Oligomer
ccaccucaaagaauuucaa

SEQ ID NO: 8325 - RNA, 19 nt, artificial
  Oligomer
cuuuuugcuggcauuuaaa

SEQ ID NO: 8326 - RNA, 19 nt, artificial
  Oligomer
gugauugugccaaacaaaa

SEQ ID NO: 8327 - RNA, 19 nt, artificial
  Oligomer
agguuuggguuuuucuaaa

SEQ ID NO: 8328 - RNA, 19 nt, artificial
  Oligomer
cuuugaguuugauggcaga

SEQ ID NO: 8329 - RNA, 19 nt, artificial
  Oligomer
ugauugugccaaacaaaaa

SEQ ID NO: 8330 - RNA, 19 nt, artificial
  Oligomer
cuagaaaaugucacuugaa

SEQ ID NO: 8331 - RNA, 19 nt, artificial
  Oligomer
guguguggacagaaggaau

SEQ ID NO: 8332 - RNA, 19 nt, artificial
  Oligomer
ggcacaacacuaauuacca

SEQ ID NO: 8333 - RNA, 19 nt, artificial
  Oligomer
gguuuggguuuuucuaaaa

SEQ ID NO: 8334 - RNA, 19 nt, artificial
  Oligomer
gccacaucuuaccuguaaa

SEQ ID NO: 8335 - RNA, 19 nt, artificial
  Oligomer
cuggcauuuaaauagugaa

SEQ ID NO: 8336 - RNA, 19 nt, artificial
  Oligomer
cuugccucuuccaccucaa

SEQ ID NO: 8337 - RNA, 19 nt, artificial
  Oligomer
ugugauugugccaaacaaa

SEQ ID NO: 8338 - RNA, 19 nt, artificial
  Oligomer
cugaaaggucgauuguaau

SEQ ID NO: 8339 - RNA, 19 nt, artificial
  Oligomer
cuagguuuggguuuuucua

SEQ ID NO: 8340 - RNA, 19 nt, artificial
  Oligomer
caguauugcuguguaaaaa

SEQ ID NO: 8341 - RNA, 19 nt, artificial
  Oligomer
gcagaaucacugaugggaa

SEQ ID NO: 8342 - RNA, 19 nt, artificial
  Oligomer
aguagaaaccaaaugugaa

SEQ ID NO: 8343 - RNA, 19 nt, artificial
  Oligomer
caaaaguaaucgcucugga

SEQ ID NO: 8344 - RNA, 19 nt, artificial
  Oligomer
aguguaaggcauuauggaa

SEQ ID NO: 8345 - RNA, 19 nt, artificial
  Oligomer
gguguguggacagaaggaa

SEQ ID NO: 8346 - RNA, 19 nt, artificial
  Oligomer
cugucaguaucugggucaa

SEQ ID NO: 8347 - RNA, 19 nt, artificial
  Oligomer
aaaaugugccagaaagaaa

SEQ ID NO: 8348 - RNA, 19 nt, artificial
  Oligomer
cucuggaguagaaaccaaa

SEQ ID NO: 8349 - RNA, 19 nt, artificial
  Oligomer
agaaaaugucacuugaaga

SEQ ID NO: 8350 - RNA, 19 nt, artificial
  Oligomer
cugcuggacccuuccuaaa

SEQ ID NO: 8351 - RNA, 19 nt, artificial
  Oligomer
aaaugugccagaaagaaau

SEQ ID NO: 8352 - RNA, 19 nt, artificial
  Oligomer
acaaaaaaugugccagaaa

SEQ ID NO: 8353 - RNA, 19 nt, artificial
  Oligomer
ccauccacugacucguaaa

SEQ ID NO: 8354 - RNA, 19 nt, artificial
  Oligomer
ucuagaaaaugucacuuga

SEQ ID NO: 8355 - RNA, 19 nt, artificial
  Oligomer
uugugauugugccaaacaa

SEQ ID NO: 8356 - RNA, 19 nt, artificial
  Oligomer
uacuugugauugugccaaa

SEQ ID NO: 8357 - RNA, 19 nt, artificial
  Oligomer
aaccuuguuuguaacugaa

SEQ ID NO: 8358 - RNA, 19 nt, artificial
  Oligomer
ccuuagucuccuacuuaga

SEQ ID NO: 8359 - RNA, 19 nt, artificial
  Oligomer
aaguguaaggcauuaugga

SEQ ID NO: 8360 - RNA, 19 nt, artificial
  Oligomer
uguuuagcccaaaaguaau

SEQ ID NO: 8361 - RNA, 19 nt, artificial
  Oligomer
guacccauuuucacaaaaa

SEQ ID NO: 8362 - RNA, 19 nt, artificial
  Oligomer
aaaaaaugugccagaaaga

SEQ ID NO: 8363 - RNA, 19 nt, artificial
  Oligomer
uuguuuagcccaaaaguaa

SEQ ID NO: 8364 - RNA, 19 nt, artificial
  Oligomer
ugguguguggacagaagga

SEQ ID NO: 8365 - RNA, 19 nt, artificial
  Oligomer
cggacuucauuuaaccgau

SEQ ID NO: 8366 - RNA, 19 nt, artificial
  Oligomer
gccuguuuacggacuucau

SEQ ID NO: 8367 - RNA, 19 nt, artificial
  Oligomer
uugugacaaggacucccaa

SEQ ID NO: 8368 - RNA, 19 nt, artificial
  Oligomer
ccuuguuuguaacugaaag

SEQ ID NO: 8369 - RNA, 19 nt, artificial
  Oligomer
aaaccuuguuuguaacuga

SEQ ID NO: 8370 - RNA, 19 nt, artificial
  Oligomer
ccuacuuagagauauucua

SEQ ID NO: 8371 - RNA, 19 nt, artificial
  Oligomer
aguguauaugugaacuuga

SEQ ID NO: 8372 - RNA, 19 nt, artificial
  Oligomer
cccuguuuguguuuugguu

SEQ ID NO: 8373 - RNA, 19 nt, artificial
  Oligomer
uccucaacuuuccaaguaa

SEQ ID NO: 8374 - RNA, 19 nt, artificial
  Oligomer
caaaaaaugugccagaaag

SEQ ID NO: 8375 - RNA, 19 nt, artificial
  Oligomer
ccuguuuacggacuucauu

SEQ ID NO: 8376 - RNA, 19 nt, artificial
  Oligomer
gcuguguaaaaauucugua

SEQ ID NO: 8377 - RNA, 19 nt, artificial
  Oligomer
aagcgguauuaaguuguaa

SEQ ID NO: 8378 - RNA, 19 nt, artificial
  Oligomer
acuugaagaggaaguauuu

SEQ ID NO: 8379 - RNA, 19 nt, artificial
  Oligomer
caaagaauuucaaggcucu

SEQ ID NO: 8380 - RNA, 19 nt, artificial
  Oligomer
gguuugauuuggcuuuuuu

SEQ ID NO: 8381 - RNA, 19 nt, artificial
  Oligomer
gaugcaucacacuugccca

SEQ ID NO: 8382 - RNA, 19 nt, artificial
  Oligomer
aaaugucacuugaagagga

SEQ ID NO: 8383 - RNA, 19 nt, artificial
  Oligomer
augugaacuugacacucca

SEQ ID NO: 8384 - RNA, 19 nt, artificial
  Oligomer
cagaaucacugaugggaau

SEQ ID NO: 8385 - RNA, 19 nt, artificial
  Oligomer
cguacccauuuucacaaaa

SEQ ID NO: 8386 - RNA, 19 nt, artificial
  Oligomer
accuuguuuguaacugaaa

SEQ ID NO: 8387 - RNA, 19 nt, artificial
  Oligomer
agaaggaauggaaagccaa

SEQ ID NO: 8388 - RNA, 19 nt, artificial
  Oligomer
aaaaaugugccagaaagaa

SEQ ID NO: 8389 - RNA, 19 nt, artificial
  Oligomer
aaguaaucgcucuggagua

SEQ ID NO: 8390 - RNA, 19 nt, artificial
  Oligomer
caaugugguggaggcaugu

SEQ ID NO: 8391 - RNA, 19 nt, artificial
  Oligomer
uagguuuggguuuuucuaa

SEQ ID NO: 8392 - RNA, 19 nt, artificial
  Oligomer
ccagcuuuuugcuggcauu

SEQ ID NO: 8393 - RNA, 19 nt, artificial
  Oligomer
gagcauaaggauuugcaca

SEQ ID NO: 8394 - RNA, 19 nt, artificial
  Oligomer
aaucgcucuggaguagaaa

SEQ ID NO: 8395 - RNA, 19 nt, artificial
  Oligomer
cggaggaugcaucacacuu

SEQ ID NO: 8396 - RNA, 19 nt, artificial
  Oligomer
gccguuuguaccuguauca

SEQ ID NO: 8397 - RNA, 19 nt, artificial
  Oligomer
gcgguauuaaguuguaauu

SEQ ID NO: 8398 - RNA, 19 nt, artificial
  Oligomer
uaaggauuugcacaccuau

SEQ ID NO: 8399 - RNA, 19 nt, artificial
  Oligomer
aaggcauuauggaacuggu

SEQ ID NO: 8400 - RNA, 19 nt, artificial
  Oligomer
gccagaaagaaaugcucuu

SEQ ID NO: 8401 - RNA, 19 nt, artificial
  Oligomer
guaaagucuuacuugugau

SEQ ID NO: 8402 - RNA, 19 nt, artificial
  Oligomer
cuugaagaggaaguauuua

SEQ ID NO: 8403 - RNA, 19 nt, artificial
  Oligomer
guuugauggcagaaucacu

SEQ ID NO: 8404 - RNA, 19 nt, artificial
  Oligomer
uugccucuuccaccucaaa

SEQ ID NO: 8405 - RNA, 19 nt, artificial
  Oligomer
caacuuuccaaguaacauu

SEQ ID NO: 8406 - RNA, 19 nt, artificial
  Oligomer
aacaaaaaaugugccagaa

SEQ ID NO: 8407 - RNA, 19 nt, artificial
  Oligomer
ccuguaaagucuuacuugu

SEQ ID NO: 8408 - RNA, 19 nt, artificial
  Oligomer
gauuguaauggauugccgu

SEQ ID NO: 8409 - RNA, 19 nt, artificial
  Oligomer
agcgguauuaaguuguaau

SEQ ID NO: 8410 - RNA, 19 nt, artificial
  Oligomer
cacaacacuaauuaccauu

SEQ ID NO: 8411 - RNA, 19 nt, artificial
  Oligomer
auuuuaaucuggcacaaca

SEQ ID NO: 8412 - RNA, 19 nt, artificial
  Oligomer
ggcucuuaccuuacuuuau

SEQ ID NO: 8413 - RNA, 19 nt, artificial
  Oligomer
ccgcacaaauacaccuaca

SEQ ID NO: 8414 - RNA, 19 nt, artificial
  Oligomer
uuauggaacugguucuuau

SEQ ID NO: 8415 - RNA, 19 nt, artificial
  Oligomer
aaaugcucuugcuuccuca

SEQ ID NO: 8416 - RNA, 19 nt, artificial
  Oligomer
aaacaaaaaaugugccaga

SEQ ID NO: 8417 - RNA, 19 nt, artificial
  Oligomer
ugugaauagccacaucuua

SEQ ID NO: 8418 - RNA, 19 nt, artificial
  Oligomer
ccauuuuuugggcggagga

SEQ ID NO: 8419 - RNA, 19 nt, artificial
  Oligomer
gaguuugauggcagaauca

SEQ ID NO: 8420 - RNA, 19 nt, artificial
  Oligomer
ccauuuuuaaagcgguauu

SEQ ID NO: 8421 - RNA, 19 nt, artificial
  Oligomer
uguauaugugaacuugaca

SEQ ID NO: 8422 - RNA, 19 nt, artificial
  Oligomer
aggcauuauggaacugguu

SEQ ID NO: 8423 - RNA, 19 nt, artificial
  Oligomer
aaugcucuugcuuccucaa

SEQ ID NO: 8424 - RNA, 19 nt, artificial
  Oligomer
gcccaaaaguaaucgcucu

SEQ ID NO: 8425 - RNA, 19 nt, artificial
  Oligomer
gauuuauuuguuuagccca

SEQ ID NO: 8426 - RNA, 19 nt, artificial
  Oligomer
cauuuuuugggcggaggau

SEQ ID NO: 8427 - RNA, 19 nt, artificial
  Oligomer
cuaugggcaaacugggaga

SEQ ID NO: 8428 - RNA, 19 nt, artificial
  Oligomer
ggacuucagcucugcuguu

SEQ ID NO: 8429 - RNA, 19 nt, artificial
  Oligomer
aucugggucaagagcauaa

SEQ ID NO: 8430 - RNA, 19 nt, artificial
  Oligomer
aaucuggcacaacacuaau

SEQ ID NO: 8431 - RNA, 19 nt, artificial
  Oligomer
guuuguguuuugguuugau

SEQ ID NO: 8432 - RNA, 19 nt, artificial
  Oligomer
aaauaugaaguguaaggca

SEQ ID NO: 8433 - RNA, 19 nt, artificial
  Oligomer
acugacucguaaaguucca

SEQ ID NO: 8434 - RNA, 19 nt, artificial
  Oligomer
gauugccguuuguaccugu

SEQ ID NO: 8435 - RNA, 19 nt, artificial
  Oligomer
aacugaaaggucgauugua

SEQ ID NO: 8436 - RNA, 19 nt, artificial
  Oligomer
uuuuguccauuucucuucc

SEQ ID NO: 8437 - RNA, 19 nt, artificial
  Oligomer
augucaaaaacguacccau

SEQ ID NO: 8438 - RNA, 19 nt, artificial
  Oligomer
gugaacuugacacuccaaa

SEQ ID NO: 8439 - RNA, 19 nt, artificial
  Oligomer
ugugaacuugacacuccaa

SEQ ID NO: 8440 - RNA, 19 nt, artificial
  Oligomer
ggcagaaucacugauggga

SEQ ID NO: 8441 - RNA, 19 nt, artificial
  Oligomer
ucuugcauuuuaaagugga

SEQ ID NO: 8442 - RNA, 19 nt, artificial
  Oligomer
gaaagaaaugcucuugcuu

SEQ ID NO: 8443 - RNA, 19 nt, artificial
  Oligomer
ccaaacaaaaaaugugcca

SEQ ID NO: 8444 - RNA, 19 nt, artificial
  Oligomer
cguaaaguuccauuuuuug

SEQ ID NO: 8445 - RNA, 19 nt, artificial
  Oligomer
ugaugggaauccagcuuuu

SEQ ID NO: 8446 - RNA, 19 nt, artificial
  Oligomer
ccucuuccaccucaaagaa

SEQ ID NO: 8447 - RNA, 19 nt, artificial
  Oligomer
cuuacuugugauugugcca

SEQ ID NO: 8448 - RNA, 19 nt, artificial
  Oligomer
ucuggaguagaaaccaaau

SEQ ID NO: 8449 - RNA, 19 nt, artificial
  Oligomer
cuguuuacggacuucauuu

SEQ ID NO: 8450 - RNA, 19 nt, artificial
  Oligomer
cucguaaaguuccauuuuu

SEQ ID NO: 8451 - RNA, 19 nt, artificial
  Oligomer
ucaguauugcuguguaaaa

SEQ ID NO: 8452 - RNA, 19 nt, artificial
  Oligomer
cagaaggaauggaaagcca

SEQ ID NO: 8453 - RNA, 19 nt, artificial
  Oligomer
cacuccaaacuccugucau

SEQ ID NO: 8454 - RNA, 19 nt, artificial
  Oligomer
cuugcauuuuaaaguggag

SEQ ID NO: 8455 - RNA, 19 nt, artificial
  Oligomer
auaugaaguguaaggcauu

SEQ ID NO: 8456 - RNA, 19 nt, artificial
  Oligomer
aagucuuacuugugauugu

SEQ ID NO: 8457 - RNA, 19 nt, artificial
  Oligomer
gacucguaaaguuccauuu

SEQ ID NO: 8458 - RNA, 19 nt, artificial
  Oligomer
ccaaacuccugucauggca

SEQ ID NO: 8459 - RNA, 19 nt, artificial
  Oligomer
gccucuuccaccucaaaga

SEQ ID NO: 8460 - RNA, 19 nt, artificial
  Oligomer
cccauuuucacaaaaauga

SEQ ID NO: 8461 - RNA, 19 nt, artificial
  Oligomer
acguacccauuuucacaaa

SEQ ID NO: 8462 - RNA, 19 nt, artificial
  Oligomer
cgcucuggaguagaaacca

SEQ ID NO: 8463 - RNA, 19 nt, artificial
  Oligomer
ugugcugugcugucaguau

SEQ ID NO: 8464 - RNA, 19 nt, artificial
  Oligomer
aggucgauuguaauggauu

SEQ ID NO: 8465 - RNA, 19 nt, artificial
  Oligomer
aguccagauuucuagguuu

SEQ ID NO: 8466 - RNA, 19 nt, artificial
  Oligomer
uguggacagaaggaaugga

SEQ ID NO: 8467 - RNA, 19 nt, artificial
  Oligomer
ccauuuucacaaaaaugag

SEQ ID NO: 8468 - RNA, 19 nt, artificial
  Oligomer
ccaaaugugaauagccaca

SEQ ID NO: 8469 - RNA, 19 nt, artificial
  Oligomer
caaggacucccaauguggu

SEQ ID NO: 8470 - RNA, 19 nt, artificial
  Oligomer
cguuuguaccuguaucagu

SEQ ID NO: 8471 - RNA, 19 nt, artificial
  Oligomer
cagauuucuagguuugggu

SEQ ID NO: 8472 - RNA, 19 nt, artificial
  Oligomer
ccuuccuaaaccugucacu

SEQ ID NO: 8473 - RNA, 19 nt, artificial
  Oligomer
uauggaacugguucuuauu

SEQ ID NO: 8474 - RNA, 19 nt, artificial
  Oligomer
aauaugaaguguaaggcau

SEQ ID NO: 8475 - RNA, 19 nt, artificial
  Oligomer
ugugacaaggacucccaau

SEQ ID NO: 8476 - RNA, 19 nt, artificial
  Oligomer
aaggucgauuguaauggau

SEQ ID NO: 8477 - RNA, 19 nt, artificial
  Oligomer
cuggcacaacacuaauuac

SEQ ID NO: 8478 - RNA, 19 nt, artificial
  Oligomer
gguuugucucuuugaguuu

SEQ ID NO: 8479 - RNA, 19 nt, artificial
  Oligomer
cacaaauacaccuacagcu

SEQ ID NO: 8480 - RNA, 19 nt, artificial
  Oligomer
ugggucaagagcauaagga

SEQ ID NO: 8481 - RNA, 19 nt, artificial
  Oligomer
ccuguuuguguuuugguuu

SEQ ID NO: 8482 - RNA, 19 nt, artificial
  Oligomer
guuuguaacugaaaggucg

SEQ ID NO: 8483 - RNA, 19 nt, artificial
  Oligomer
gaugggaauccagcuuuuu

SEQ ID NO: 8484 - RNA, 19 nt, artificial
  Oligomer
cacugaugggaauccagcu

SEQ ID NO: 8485 - RNA, 19 nt, artificial
  Oligomer
cuucccuccucuugcauuu

SEQ ID NO: 8486 - RNA, 19 nt, artificial
  Oligomer
aaacguacccauuuucaca

SEQ ID NO: 8487 - RNA, 19 nt, artificial
  Oligomer
agccacaucuuaccuguaa

SEQ ID NO: 8488 - RNA, 19 nt, artificial
  Oligomer
auugccguuuguaccugua

SEQ ID NO: 8489 - RNA, 19 nt, artificial
  Oligomer
ggauuugcacaccuauggg

SEQ ID NO: 8490 - RNA, 19 nt, artificial
  Oligomer
ugauggcagaaucacugau

SEQ ID NO: 8491 - RNA, 19 nt, artificial
  Oligomer
auuuuaaaguggaggguuu

SEQ ID NO: 8492 - RNA, 19 nt, artificial
  Oligomer
caucuuaccuguaaagucu

SEQ ID NO: 8493 - RNA, 19 nt, artificial
  Oligomer
uuuguaacugaaaggucga

SEQ ID NO: 8494 - RNA, 19 nt, artificial
  Oligomer
aaggaauggaaagccaaau

SEQ ID NO: 8495 - RNA, 19 nt, artificial
  Oligomer
ggacccuuccuaaaccugu

SEQ ID NO: 8496 - RNA, 19 nt, artificial
  Oligomer
uguccauuucucuucccuc

SEQ ID NO: 8497 - RNA, 19 nt, artificial
  Oligomer
aggcucuuaccuuacuuua

SEQ ID NO: 8498 - RNA, 19 nt, artificial
  Oligomer
uuucaaggcucuuaccuua

SEQ ID NO: 8499 - RNA, 19 nt, artificial
  Oligomer
ccucaacuuuccaaguaac

SEQ ID NO: 8500 - RNA, 19 nt, artificial
  Oligomer
uguaaagucuuacuuguga

SEQ ID NO: 8501 - RNA, 19 nt, artificial
  Oligomer
aaccaaaugugaauagcca

SEQ ID NO: 8502 - RNA, 19 nt, artificial
  Oligomer
aaaaguaaucgcucuggag

SEQ ID NO: 8503 - RNA, 19 nt, artificial
  Oligomer
ugcuguguaaaaauucugu

SEQ ID NO: 8504 - RNA, 19 nt, artificial
  Oligomer
uaauggauugccguuugua

SEQ ID NO: 8505 - RNA, 19 nt, artificial
  Oligomer
gacccuuccuaaaccuguc

SEQ ID NO: 8506 - RNA, 19 nt, artificial
  Oligomer
ugucauggcacggaagcua

SEQ ID NO: 8507 - RNA, 19 nt, artificial
  Oligomer
guuugauuuggcuuuuuuc

SEQ ID NO: 8508 - RNA, 19 nt, artificial
  Oligomer
uguuuguguuuugguuuga

SEQ ID NO: 8509 - RNA, 19 nt, artificial
  Oligomer
aguaucugggucaagagca

SEQ ID NO: 8510 - RNA, 19 nt, artificial
  Oligomer
ucaguaucugggucaagag

SEQ ID NO: 8511 - RNA, 19 nt, artificial
  Oligomer
gcugucaguaucuggguca

SEQ ID NO: 8512 - RNA, 19 nt, artificial
  Oligomer
uuaaucuggcacaacacua

SEQ ID NO: 8513 - RNA, 19 nt, artificial
  Oligomer
agauuucuagguuuggguu

SEQ ID NO: 8514 - RNA, 19 nt, artificial
  Oligomer
aguggaggguuugucucuu

SEQ ID NO: 8515 - RNA, 19 nt, artificial
  Oligomer
caaggcucuuaccuuacuu

SEQ ID NO: 8516 - RNA, 19 nt, artificial
  Oligomer
ugucaaaaacguacccauu

SEQ ID NO: 8517 - RNA, 19 nt, artificial
  Oligomer
guuuugguuugauuuggcu

SEQ ID NO: 8518 - RNA, 19 nt, artificial
  Oligomer
uaucugggucaagagcaua

SEQ ID NO: 8519 - RNA, 19 nt, artificial
  Oligomer
ucaacuuuccaaguaacau

SEQ ID NO: 8520 - RNA, 19 nt, artificial
  Oligomer
guaaucgcucuggaguaga

SEQ ID NO: 8521 - RNA, 19 nt, artificial
  Oligomer
guuccauuuuuugggcgga

SEQ ID NO: 8522 - RNA, 19 nt, artificial
  Oligomer
ccuguaucaguauugcugu

SEQ ID NO: 8523 - RNA, 19 nt, artificial
  Oligomer
uaccauuuuuaaagcggua

SEQ ID NO: 8524 - RNA, 19 nt, artificial
  Oligomer
cacuugaagaggaaguauu

SEQ ID NO: 8525 - RNA, 19 nt, artificial
  Oligomer
guccauuucucuucccucc

SEQ ID NO: 8526 - RNA, 19 nt, artificial
  Oligomer
ugugccaaacaaaaaaugu

SEQ ID NO: 8527 - RNA, 19 nt, artificial
  Oligomer
ucuuaccuguaaagucuua

SEQ ID NO: 8528 - RNA, 19 nt, artificial
  Oligomer
acucguaaaguuccauuuu

SEQ ID NO: 8529 - RNA, 19 nt, artificial
  Oligomer
uccuuagucuccuacuuag

SEQ ID NO: 8530 - RNA, 19 nt, artificial
  Oligomer
ccaaauuaauuuaguccag

SEQ ID NO: 8531 - RNA, 19 nt, artificial
  Oligomer
cuugacacuccaaacuccu

SEQ ID NO: 8532 - RNA, 19 nt, artificial
  Oligomer
cucuuugaguuugauggca

SEQ ID NO: 8533 - RNA, 19 nt, artificial
  Oligomer
uuuuuguccauuucucuuc

SEQ ID NO: 8534 - RNA, 19 nt, artificial
  Oligomer
cugacucguaaaguuccau

SEQ ID NO: 8535 - RNA, 19 nt, artificial
  Oligomer
ccguuuguaccuguaucag

SEQ ID NO: 8536 - RNA, 19 nt, artificial
  Oligomer
ugccauccacugacucgua

SEQ ID NO: 8537 - RNA, 19 nt, artificial
  Oligomer
ucuccuacuuagagauauu

SEQ ID NO: 8538 - RNA, 19 nt, artificial
  Oligomer
ucuagguuuggguuuuucu

SEQ ID NO: 8539 - RNA, 19 nt, artificial
  Oligomer
gccaaauuaauuuagucca

SEQ ID NO: 8540 - RNA, 19 nt, artificial
  Oligomer
uuugcacaccuaugggcaa

SEQ ID NO: 8541 - RNA, 19 nt, artificial
  Oligomer
gggaauccagcuuuuugcu

SEQ ID NO: 8542 - RNA, 19 nt, artificial
  Oligomer
cauuuuaaaguggaggguu

SEQ ID NO: 8543 - RNA, 19 nt, artificial
  Oligomer
gcauuuuaaaguggagggu

SEQ ID NO: 8544 - RNA, 19 nt, artificial
  Oligomer
ucccuccucuugcauuuua

SEQ ID NO: 8545 - RNA, 19 nt, artificial
  Oligomer
agagcauaaggauuugcac

SEQ ID NO: 8546 - RNA, 19 nt, artificial
  Oligomer
agaauuucaaggcucuuac

SEQ ID NO: 8547 - RNA, 19 nt, artificial
  Oligomer
uccaccucaaagaauuuca

SEQ ID NO: 8548 - RNA, 19 nt, artificial
  Oligomer
ccuacagcuuuuggucccu

SEQ ID NO: 8549 - RNA, 19 nt, artificial
  Oligomer
gcacaaauacaccuacagc

SEQ ID NO: 8550 - RNA, 19 nt, artificial
  Oligomer
cugggucaagagcauaagg

SEQ ID NO: 8551 - RNA, 19 nt, artificial
  Oligomer
ugguuugauuuggcuuuuu

SEQ ID NO: 8552 - RNA, 19 nt, artificial
  Oligomer
cuuauuucccuguuugugu

SEQ ID NO: 8553 - RNA, 19 nt, artificial
  Oligomer
gcauuauggaacugguucu

SEQ ID NO: 8554 - RNA, 19 nt, artificial
  Oligomer
acuugugauugugccaaac

SEQ ID NO: 8555 - RNA, 19 nt, artificial
  Oligomer
gugcugucaguaucugggu

SEQ ID NO: 8556 - RNA, 19 nt, artificial
  Oligomer
gucacuugaagaggaagua

SEQ ID NO: 8557 - RNA, 19 nt, artificial
  Oligomer
agucuccuacuuagagaua

SEQ ID NO: 8558 - RNA, 19 nt, artificial
  Oligomer
cugucacucaagaggacuu

SEQ ID NO: 8559 - RNA, 19 nt, artificial
  Oligomer
aaccugucacucaagagga

SEQ ID NO: 8560 - RNA, 19 nt, artificial
  Oligomer
uuugucucuuugaguuuga

SEQ ID NO: 8561 - RNA, 19 nt, artificial
  Oligomer
gugccaaacaaaaaaugug

SEQ ID NO: 8562 - RNA, 19 nt, artificial
  Oligomer
cgauuuauuuguuuagccc

SEQ ID NO: 8563 - RNA, 19 nt, artificial
  Oligomer
aauggauugccguuuguac

SEQ ID NO: 8564 - RNA, 19 nt, artificial
  Oligomer
gauuucuagguuuggguuu

SEQ ID NO: 8565 - RNA, 19 nt, artificial
  Oligomer
agaguguauaugugaacuu

SEQ ID NO: 8566 - RNA, 19 nt, artificial
  Oligomer
cucaacuuuccaaguaaca

SEQ ID NO: 8567 - RNA, 19 nt, artificial
  Oligomer
ugcugugcugucaguaucu

SEQ ID NO: 8568 - RNA, 19 nt, artificial
  Oligomer
ccuaaaccugucacucaag

SEQ ID NO: 8569 - RNA, 19 nt, artificial
  Oligomer
cuuccaccucaaagaauuu

SEQ ID NO: 8570 - RNA, 19 nt, artificial
  Oligomer
guguaaggcauuauggaac

SEQ ID NO: 8571 - RNA, 19 nt, artificial
  Oligomer
agaaagaaaugcucuugcu

SEQ ID NO: 8572 - RNA, 19 nt, artificial
  Oligomer
cuugugauugugccaaaca

SEQ ID NO: 8573 - RNA, 19 nt, artificial
  Oligomer
aaaguaaucgcucuggagu

SEQ ID NO: 8574 - RNA, 19 nt, artificial
  Oligomer
uuuguuuagcccaaaagua

SEQ ID NO: 8575 - RNA, 19 nt, artificial
  Oligomer
uuuugggcggaggaugcau

SEQ ID NO: 8576 - RNA, 19 nt, artificial
  Oligomer
ugacucguaaaguuccauu

SEQ ID NO: 8577 - RNA, 19 nt, artificial
  Oligomer
cgauuguaauggauugccg

SEQ ID NO: 8578 - RNA, 19 nt, artificial
  Oligomer
uuccuaaaccugucacuca

SEQ ID NO: 8579 - RNA, 19 nt, artificial
  Oligomer
uuugaguuugauggcagaa

SEQ ID NO: 8580 - RNA, 19 nt, artificial
  Oligomer
uugucucuuugaguuugau

SEQ ID NO: 8581 - RNA, 19 nt, artificial
  Oligomer
uuguccauuucucuucccu

SEQ ID NO: 8582 - RNA, 19 nt, artificial
  Oligomer
ucuuccaccucaaagaauu

SEQ ID NO: 8583 - RNA, 19 nt, artificial
  Oligomer
cgcacaaauacaccuacag

SEQ ID NO: 8584 - RNA, 19 nt, artificial
  Oligomer
ucaaaaacguacccauuuu

SEQ ID NO: 8585 - RNA, 19 nt, artificial
  Oligomer
cauuauggaacugguucuu

SEQ ID NO: 8586 - RNA, 19 nt, artificial
  Oligomer
caguaucugggucaagagc

SEQ ID NO: 8587 - RNA, 19 nt, artificial
  Oligomer
ccacaucuuaccuguaaag

SEQ ID NO: 8588 - RNA, 19 nt, artificial
  Oligomer
uagccacaucuuaccugua

SEQ ID NO: 8589 - RNA, 19 nt, artificial
  Oligomer
ggccuguuuacggacuuca

SEQ ID NO: 8590 - RNA, 19 nt, artificial
  Oligomer
cuugugacaaggacuccca

SEQ ID NO: 8591 - RNA, 19 nt, artificial
  Oligomer
gaggaugcaucacacuugc

SEQ ID NO: 8592 - RNA, 19 nt, artificial
  Oligomer
aucaguauugcuguguaaa

SEQ ID NO: 8593 - RNA, 19 nt, artificial
  Oligomer
ugccguuuguaccuguauc

SEQ ID NO: 8594 - RNA, 19 nt, artificial
  Oligomer
uugccguuuguaccuguau

SEQ ID NO: 8595 - RNA, 19 nt, artificial
  Oligomer
cuggacccuuccuaaaccu

SEQ ID NO: 8596 - RNA, 19 nt, artificial
  Oligomer
cauuucucuucccuccucu

SEQ ID NO: 8597 - RNA, 19 nt, artificial
  Oligomer
ucugggucaagagcauaag

SEQ ID NO: 8598 - RNA, 19 nt, artificial
  Oligomer
ggcuuuuuucuuaaauguc

SEQ ID NO: 8599 - RNA, 19 nt, artificial
  Oligomer
cagaauaauaacaguacug

SEQ ID NO: 8600 - RNA, 19 nt, artificial
  Oligomer
caaacuccugucauggcac

SEQ ID NO: 8601 - RNA, 19 nt, artificial
  Oligomer
ugaacuugacacuccaaac

SEQ ID NO: 8602 - RNA, 19 nt, artificial
  Oligomer
agcuuuuugcuggcauuua

SEQ ID NO: 8603 - RNA, 19 nt, artificial
  Oligomer
aggguuugucucuuugagu

SEQ ID NO: 8604 - RNA, 19 nt, artificial
  Oligomer
cucuucccuccucuugcau

SEQ ID NO: 8605 - RNA, 19 nt, artificial
  Oligomer
aacguacccauuuucacaa

SEQ ID NO: 8606 - RNA, 19 nt, artificial
  Oligomer
ggaacugguucuuauuucc

SEQ ID NO: 8607 - RNA, 19 nt, artificial
  Oligomer
ugcucuugcuuccucaacu

SEQ ID NO: 8608 - RNA, 19 nt, artificial
  Oligomer
augugaauagccacaucuu

SEQ ID NO: 8609 - RNA, 19 nt, artificial
  Oligomer
uuuuugggcggaggaugca

SEQ ID NO: 8610 - RNA, 19 nt, artificial
  Oligomer
cacugacucguaaaguucc

SEQ ID NO: 8611 - RNA, 19 nt, artificial
  Oligomer
augggcaaacugggagaca

SEQ ID NO: 8612 - RNA, 19 nt, artificial
  Oligomer
accuaugggcaaacuggga

SEQ ID NO: 8613 - RNA, 19 nt, artificial
  Oligomer
acccuuccuaaaccuguca

SEQ ID NO: 8614 - RNA, 19 nt, artificial
  Oligomer
ugcuggcauuuaaauagug

SEQ ID NO: 8615 - RNA, 19 nt, artificial
  Oligomer
uugcuggcauuuaaauagu

SEQ ID NO: 8616 - RNA, 19 nt, artificial
  Oligomer
gugccagaaagaaaugcuc

SEQ ID NO: 8617 - RNA, 19 nt, artificial
  Oligomer
augugcugugcugucagua

SEQ ID NO: 8618 - RNA, 19 nt, artificial
  Oligomer
augcaucacacuugcccau

SEQ ID NO: 8619 - RNA, 19 nt, artificial
  Oligomer
cuuagucuccuacuuagag

SEQ ID NO: 8620 - RNA, 19 nt, artificial
  Oligomer
acaccuaugggcaaacugg

SEQ ID NO: 8621 - RNA, 19 nt, artificial
  Oligomer
agaggacuucagcucugcu

SEQ ID NO: 8622 - RNA, 19 nt, artificial
  Oligomer
cacucaagaggacuucagc

SEQ ID NO: 8623 - RNA, 19 nt, artificial
  Oligomer
ugacacuccaaacuccugu

SEQ ID NO: 8624 - RNA, 19 nt, artificial
  Oligomer
aagaguguauaugugaacu

SEQ ID NO: 8625 - RNA, 19 nt, artificial
  Oligomer
cucuuccaccucaaagaau

SEQ ID NO: 8626 - RNA, 19 nt, artificial
  Oligomer
cuacagcuuuuggucccuu

SEQ ID NO: 8627 - RNA, 19 nt, artificial
  Oligomer
aaaaacguacccauuuuca

SEQ ID NO: 8628 - RNA, 19 nt, artificial
  Oligomer
cuguuuguguuuugguuug

SEQ ID NO: 8629 - RNA, 19 nt, artificial
  Oligomer
cuugcuuccucaacuuucc

SEQ ID NO: 8630 - RNA, 19 nt, artificial
  Oligomer
caguacuguauaucauuug

SEQ ID NO: 8631 - RNA, 19 nt, artificial
  Oligomer
uuuuaaucuggcacaacac

SEQ ID NO: 8632 - RNA, 19 nt, artificial
  Oligomer
ugucacuugaagaggaagu

SEQ ID NO: 8633 - RNA, 19 nt, artificial
  Oligomer
gucuccuacuuagagauau

SEQ ID NO: 8634 - RNA, 19 nt, artificial
  Oligomer
caagaggacuucagcucug

SEQ ID NO: 8635 - RNA, 19 nt, artificial
  Oligomer
gucacucaagaggacuuca

SEQ ID NO: 8636 - RNA, 19 nt, artificial
  Oligomer
aaucacugaugggaaucca

SEQ ID NO: 8637 - RNA, 19 nt, artificial
  Oligomer
uugaguuugauggcagaau

SEQ ID NO: 8638 - RNA, 19 nt, artificial
  Oligomer
cauaaggauuugcacaccu

SEQ ID NO: 8639 - RNA, 19 nt, artificial
  Oligomer
aagagcauaaggauuugca

SEQ ID NO: 8640 - RNA, 19 nt, artificial
  Oligomer
cuuuuggucccuugccucu

SEQ ID NO: 8641 - RNA, 19 nt, artificial
  Oligomer
uucuuauuucccuguuugu

SEQ ID NO: 8642 - RNA, 19 nt, artificial
  Oligomer
ggcauuauggaacugguuc

SEQ ID NO: 8643 - RNA, 19 nt, artificial
  Oligomer
gcuuccucaacuuuccaag

SEQ ID NO: 8644 - RNA, 19 nt, artificial
  Oligomer
ugcuuccucaacuuuccaa

SEQ ID NO: 8645 - RNA, 19 nt, artificial
  Oligomer
caaacaaaaaaugugccag

SEQ ID NO: 8646 - RNA, 19 nt, artificial
  Oligomer
uggaguagaaaccaaaugu

SEQ ID NO: 8647 - RNA, 19 nt, artificial
  Oligomer
ccgauuuauuuguuuagcc

SEQ ID NO: 8648 - RNA, 19 nt, artificial
  Oligomer
uuagucuccuacuuagaga

SEQ ID NO: 8649 - RNA, 19 nt, artificial
  Oligomer
uuuuuuccuuagucuccua

SEQ ID NO: 8650 - RNA, 19 nt, artificial
  Oligomer
aggacuucagcucugcugu

SEQ ID NO: 8651 - RNA, 19 nt, artificial
  Oligomer
aaagaguguauaugugaac

SEQ ID NO: 8652 - RNA, 19 nt, artificial
  Oligomer
cugaugggaauccagcuuu

SEQ ID NO: 8653 - RNA, 19 nt, artificial
  Oligomer
ucuuugaguuugauggcag

SEQ ID NO: 8654 - RNA, 19 nt, artificial
  Oligomer
gucaaaaacguacccauuu

SEQ ID NO: 8655 - RNA, 19 nt, artificial
  Oligomer
acugguucuuauuucccug

SEQ ID NO: 8656 - RNA, 19 nt, artificial
  Oligomer
uugcuuccucaacuuucca

SEQ ID NO: 8657 - RNA, 19 nt, artificial
  Oligomer
auagccacaucuuaccugu

SEQ ID NO: 8658 - RNA, 19 nt, artificial
  Oligomer
caaaugugaauagccacau

SEQ ID NO: 8659 - RNA, 19 nt, artificial
  Oligomer
auuuguuuagcccaaaagu

SEQ ID NO: 8660 - RNA, 19 nt, artificial
  Oligomer
aucuggcacaacacuaauu

SEQ ID NO: 8661 - RNA, 19 nt, artificial
  Oligomer
uguguggacagaaggaaug

SEQ ID NO: 8662 - RNA, 19 nt, artificial
  Oligomer
ucuucccuccucuugcauu

SEQ ID NO: 8663 - RNA, 19 nt, artificial
  Oligomer
agcuuuuggucccuugccu

SEQ ID NO: 8664 - RNA, 19 nt, artificial
  Oligomer
ugccgcacaaauacaccua

SEQ ID NO: 8665 - RNA, 19 nt, artificial
  Oligomer
cauuuucacaaaaaugagg

SEQ ID NO: 8666 - RNA, 19 nt, artificial
  Oligomer
gugacaaggacucccaaug

SEQ ID NO: 8667 - RNA, 19 nt, artificial
  Oligomer
cuguaaagucuuacuugug

SEQ ID NO: 8668 - RNA, 19 nt, artificial
  Oligomer
ggauugccguuuguaccug

SEQ ID NO: 8669 - RNA, 19 nt, artificial
  Oligomer
ucacuugaagaggaaguau

SEQ ID NO: 8670 - RNA, 19 nt, artificial
  Oligomer
uuuccuuagucuccuacuu

SEQ ID NO: 8671 - RNA, 19 nt, artificial
  Oligomer
cacaccuaugggcaaacug

SEQ ID NO: 8672 - RNA, 19 nt, artificial
  Oligomer
accugucacucaagaggac

SEQ ID NO: 8673 - RNA, 19 nt, artificial
  Oligomer
uugcacaccuaugggcaaa

SEQ ID NO: 8674 - RNA, 19 nt, artificial
  Oligomer
ugcuggacccuuccuaaac

SEQ ID NO: 8675 - RNA, 19 nt, artificial
  Oligomer
gauggcagaaucacugaug

SEQ ID NO: 8676 - RNA, 19 nt, artificial
  Oligomer
cucuugcuuccucaacuuu

SEQ ID NO: 8677 - RNA, 19 nt, artificial
  Oligomer
ugucaguaucugggucaag

SEQ ID NO: 8678 - RNA, 19 nt, artificial
  Oligomer
ccagaaagaaaugcucuug

SEQ ID NO: 8679 - RNA, 19 nt, artificial
  Oligomer
uuacuugugauugugccaa

SEQ ID NO: 8680 - RNA, 19 nt, artificial
  Oligomer
cuuguuuguaacugaaagg

SEQ ID NO: 8681 - RNA, 19 nt, artificial
  Oligomer
cauccacugacucguaaag

SEQ ID NO: 8682 - RNA, 19 nt, artificial
  Oligomer
cuacuuagagauauucuag

SEQ ID NO: 8683 - RNA, 19 nt, artificial
  Oligomer
uagucuccuacuuagagau

SEQ ID NO: 8684 - RNA, 19 nt, artificial
  Oligomer
guguggacagaaggaaugg

SEQ ID NO: 8685 - RNA, 19 nt, artificial
  Oligomer
caccucaaagaauuucaag

SEQ ID NO: 8686 - RNA, 19 nt, artificial
  Oligomer
augaaguguaaggcauuau

SEQ ID NO: 8687 - RNA, 19 nt, artificial
  Oligomer
cuuccucaacuuuccaagu

SEQ ID NO: 8688 - RNA, 19 nt, artificial
  Oligomer
accuguaaagucuuacuug

SEQ ID NO: 8689 - RNA, 19 nt, artificial
  Oligomer
uuuacggacuucauuuaac

SEQ ID NO: 8690 - RNA, 19 nt, artificial
  Oligomer
uuguaacugaaaggucgau

SEQ ID NO: 8691 - RNA, 19 nt, artificial
  Oligomer
uuuaaucuggcacaacacu

SEQ ID NO: 8692 - RNA, 19 nt, artificial
  Oligomer
uccuacuuagagauauucu

SEQ ID NO: 8693 - RNA, 19 nt, artificial
  Oligomer
auuucuagguuuggguuuu

SEQ ID NO: 8694 - RNA, 19 nt, artificial
  Oligomer
acacuccaaacuccuguca

SEQ ID NO: 8695 - RNA, 19 nt, artificial
  Oligomer
cagcuuuuugcuggcauuu

SEQ ID NO: 8696 - RNA, 19 nt, artificial
  Oligomer
uugauggcagaaucacuga

SEQ ID NO: 8697 - RNA, 19 nt, artificial
  Oligomer
gccgcacaaauacaccuac

SEQ ID NO: 8698 - RNA, 19 nt, artificial
  Oligomer
uguuuugguuugauuuggc

SEQ ID NO: 8699 - RNA, 19 nt, artificial
  Oligomer
agucuuacuugugauugug

SEQ ID NO: 8700 - RNA, 19 nt, artificial
  Oligomer
guuuuuuuuccuuagucuc

SEQ ID NO: 8701 - RNA, 19 nt, artificial
  Oligomer
uuucuagguuuggguuuuu

SEQ ID NO: 8702 - RNA, 19 nt, artificial
  Oligomer
acucaagaggacuucagcu

SEQ ID NO: 8703 - RNA, 19 nt, artificial
  Oligomer
agugaaaagaguguauaug

SEQ ID NO: 8704 - RNA, 19 nt, artificial
  Oligomer
acugaugggaauccagcuu

SEQ ID NO: 8705 - RNA, 19 nt, artificial
  Oligomer
ccucuugcauuuuaaagug

SEQ ID NO: 8706 - RNA, 19 nt, artificial
  Oligomer
ccuuacuuuauuuuugucc

SEQ ID NO: 8707 - RNA, 19 nt, artificial
  Oligomer
auuucaaggcucuuaccuu

SEQ ID NO: 8708 - RNA, 19 nt, artificial
  Oligomer
aagaauuucaaggcucuua

SEQ ID NO: 8709 - RNA, 19 nt, artificial
  Oligomer
uugguuugauuuggcuuuu

SEQ ID NO: 8710 - RNA, 19 nt, artificial
  Oligomer
guguuuugguuugauuugg

SEQ ID NO: 8711 - RNA, 19 nt, artificial
  Oligomer
gaauagccacaucuuaccu

SEQ ID NO: 8712 - RNA, 19 nt, artificial
  Oligomer
ugaauagccacaucuuacc

SEQ ID NO: 8713 - RNA, 19 nt, artificial
  Oligomer
aaaugugaauagccacauc

SEQ ID NO: 8714 - RNA, 19 nt, artificial
  Oligomer
auuguaauggauugccguu

SEQ ID NO: 8715 - RNA, 19 nt, artificial
  Oligomer
uguaacugaaaggucgauu

SEQ ID NO: 8716 - RNA, 19 nt, artificial
  Oligomer
ucaagaggacuucagcucu

SEQ ID NO: 8717 - RNA, 19 nt, artificial
  Oligomer
auuucucuucccuccucuu

SEQ ID NO: 8718 - RNA, 19 nt, artificial
  Oligomer
ucaaggcucuuaccuuacu

SEQ ID NO: 8719 - RNA, 19 nt, artificial
  Oligomer
gaauuucaaggcucuuacc

SEQ ID NO: 8720 - RNA, 19 nt, artificial
  Oligomer
aaagaauuucaaggcucuu

SEQ ID NO: 8721 - RNA, 19 nt, artificial
  Oligomer
uacagcuuuuggucccuug

SEQ ID NO: 8722 - RNA, 19 nt, artificial
  Oligomer
aacugguucuuauuucccu

SEQ ID NO: 8723 - RNA, 19 nt, artificial
  Oligomer
auuauggaacugguucuua

SEQ ID NO: 8724 - RNA, 19 nt, artificial
  Oligomer
uggauagaaauaugaagug

SEQ ID NO: 8725 - RNA, 19 nt, artificial
  Oligomer
uaaagcgguauuaaguugu

SEQ ID NO: 8726 - RNA, 19 nt, artificial
  Oligomer
uuaccauuuuuaaagcggu

SEQ ID NO: 8727 - RNA, 19 nt, artificial
  Oligomer
augucacuugaagaggaag

SEQ ID NO: 8728 - RNA, 19 nt, artificial
  Oligomer
uccagcuuuuugcuggcau

SEQ ID NO: 8729 - RNA, 19 nt, artificial
  Oligomer
auggcagaaucacugaugg

SEQ ID NO: 8730 - RNA, 19 nt, artificial
  Oligomer
acagcuuuuggucccuugc

SEQ ID NO: 8731 - RNA, 19 nt, artificial
  Oligomer
aaaacguacccauuuucac

SEQ ID NO: 8732 - RNA, 19 nt, artificial
  Oligomer
uuugguuugauuuggcuuu

SEQ ID NO: 8733 - RNA, 19 nt, artificial
  Oligomer
uuuugguuugauuuggcuu

SEQ ID NO: 8734 - RNA, 19 nt, artificial
  Oligomer
uguguuuugguuugauuug

SEQ ID NO: 8735 - RNA, 19 nt, artificial
  Oligomer
ucccuguuuguguuuuggu

SEQ ID NO: 8736 - RNA, 19 nt, artificial
  Oligomer
aaugugccagaaagaaaug

SEQ ID NO: 8737 - RNA, 19 nt, artificial
  Oligomer
ugugcugucaguaucuggg

SEQ ID NO: 8738 - RNA, 19 nt, artificial
  Oligomer
guuuagcccaaaaguaauc

SEQ ID NO: 8739 - RNA, 19 nt, artificial
  Oligomer
acggacuucauuuaaccga

SEQ ID NO: 8740 - RNA, 19 nt, artificial
  Oligomer
cuguaucaguauugcugug

SEQ ID NO: 8741 - RNA, 19 nt, artificial
  Oligomer
ccagauuucuagguuuggg

SEQ ID NO: 8742 - RNA, 19 nt, artificial
  Oligomer
auuugcacaccuaugggca

SEQ ID NO: 8743 - RNA, 19 nt, artificial
  Oligomer
ccauuucucuucccuccuc

SEQ ID NO: 8744 - RNA, 19 nt, artificial
  Oligomer
cucaaagaauuucaaggcu

SEQ ID NO: 8745 - RNA, 19 nt, artificial
  Oligomer
acaucuuaccuguaaaguc

SEQ ID NO: 8746 - RNA, 19 nt, artificial
  Oligomer
uuggccuguuuacggacuu

SEQ ID NO: 8747 - RNA, 19 nt, artificial
  Oligomer
uguuuguaacugaaagguc

SEQ ID NO: 8748 - RNA, 19 nt, artificial
  Oligomer
uaaaccugucacucaagag

SEQ ID NO: 8749 - RNA, 19 nt, artificial
  Oligomer
aaggauuugcacaccuaug

SEQ ID NO: 8750 - RNA, 19 nt, artificial
  Oligomer
aaggcucuuaccuuacuuu

SEQ ID NO: 8751 - RNA, 19 nt, artificial
  Oligomer
cugccgcacaaauacaccu

SEQ ID NO: 8752 - RNA, 19 nt, artificial
  Oligomer
cugguucuuauuucccugu

SEQ ID NO: 8753 - RNA, 19 nt, artificial
  Oligomer
cugugcugucaguaucugg

SEQ ID NO: 8754 - RNA, 19 nt, artificial
  Oligomer
accaaaugugaauagccac

SEQ ID NO: 8755 - RNA, 19 nt, artificial
  Oligomer
uuacggacuucauuuaacc

SEQ ID NO: 8756 - RNA, 19 nt, artificial
  Oligomer
uuguaccuguaucaguauu

SEQ ID NO: 8757 - RNA, 19 nt, artificial
  Oligomer
uuuguaccuguaucaguau

SEQ ID NO: 8758 - RNA, 19 nt, artificial
  Oligomer
acuucagcucugcuguugg

SEQ ID NO: 8759 - RNA, 19 nt, artificial
  Oligomer
uggcagaaucacugauggg

SEQ ID NO: 8760 - RNA, 19 nt, artificial
  Oligomer
caaaaacguacccauuuuc

SEQ ID NO: 8761 - RNA, 19 nt, artificial
  Oligomer
uggaacugguucuuauuuc

SEQ ID NO: 8762 - RNA, 19 nt, artificial
  Oligomer
auggaacugguucuuauuu

SEQ ID NO: 8763 - RNA, 19 nt, artificial
  Oligomer
ugccagaaagaaaugcucu

SEQ ID NO: 8764 - RNA, 19 nt, artificial
  Oligomer
gccaaacaaaaaaugugcc

SEQ ID NO: 8765 - RNA, 19 nt, artificial
  Oligomer
ugcugucaguaucuggguc

SEQ ID NO: 8766 - RNA, 19 nt, artificial
  Oligomer
aucuuaccuguaaagucuu

SEQ ID NO: 8767 - RNA, 19 nt, artificial
  Oligomer
uauuuguuuagcccaaaag

SEQ ID NO: 8768 - RNA, 19 nt, artificial
  Oligomer
acuugacacuccaaacucc

SEQ ID NO: 8769 - RNA, 19 nt, artificial
  Oligomer
guauaugugaacuugacac

SEQ ID NO: 8770 - RNA, 19 nt, artificial
  Oligomer
uuugcuggcauuuaaauag

SEQ ID NO: 8771 - RNA, 19 nt, artificial
  Oligomer
aucacugaugggaauccag

SEQ ID NO: 8772 - RNA, 19 nt, artificial
  Oligomer
ugguucuuauuucccuguu

SEQ ID NO: 8773 - RNA, 19 nt, artificial
  Oligomer
uuccucaacuuuccaagua

SEQ ID NO: 8774 - RNA, 19 nt, artificial
  Oligomer
acaaggacucccaaugugg

SEQ ID NO: 8775 - RNA, 19 nt, artificial
  Oligomer
ccugucacucaagaggacu

SEQ ID NO: 8776 - RNA, 19 nt, artificial
  Oligomer
cccuuccuaaaccugucac

SEQ ID NO: 8777 - RNA, 19 nt, artificial
  Oligomer
uuuaaaguggaggguuugu

SEQ ID NO: 8778 - RNA, 19 nt, artificial
  Oligomer
uccucuugcauuuuaaagu

SEQ ID NO: 8779 - RNA, 19 nt, artificial
  Oligomer
uccauuucucuucccuccu

SEQ ID NO: 8780 - RNA, 19 nt, artificial
  Oligomer
ucaaagaauuucaaggcuc

SEQ ID NO: 8781 - RNA, 19 nt, artificial
  Oligomer
aaugucaaaaacguaccca

SEQ ID NO: 8782 - RNA, 19 nt, artificial
  Oligomer
uugugccaaacaaaaaaug

SEQ ID NO: 8783 - RNA, 19 nt, artificial
  Oligomer
uggauugccguuuguaccu

SEQ ID NO: 8784 - RNA, 19 nt, artificial
  Oligomer
gaauccagcuuuuugcugg

SEQ ID NO: 8785 - RNA, 19 nt, artificial
  Oligomer
ugggaauccagcuuuuugc

SEQ ID NO: 8786 - RNA, 19 nt, artificial
  Oligomer
gcauaaggauuugcacacc

SEQ ID NO: 8787 - RNA, 19 nt, artificial
  Oligomer
gaaauaugaaguguaaggc

SEQ ID NO: 8788 - RNA, 19 nt, artificial
  Oligomer
aaagaaaugcucuugcuuc

SEQ ID NO: 8789 - RNA, 19 nt, artificial
  Oligomer
ugugccagaaagaaaugcu

SEQ ID NO: 8790 - RNA, 19 nt, artificial
  Oligomer
cuuggccuguuuacggacu

SEQ ID NO: 8791 - RNA, 19 nt, artificial
  Oligomer
uauuuuaaucuggcacaac

SEQ ID NO: 8792 - RNA, 19 nt, artificial
  Oligomer
uuuuccuuagucuccuacu

SEQ ID NO: 8793 - RNA, 19 nt, artificial
  Oligomer
cucuugcauuuuaaagugg

SEQ ID NO: 8794 - RNA, 19 nt, artificial
  Oligomer
acccauuuucacaaaaaug

SEQ ID NO: 8795 - RNA, 19 nt, artificial
  Oligomer
ucuugcuuccucaacuuuc

SEQ ID NO: 8796 - RNA, 19 nt, artificial
  Oligomer
auuuuuugggcggaggaug

SEQ ID NO: 8797 - RNA, 19 nt, artificial
  Oligomer
aaggacucccaauguggug

SEQ ID NO: 8798 - RNA, 19 nt, artificial
  Oligomer
auuuaguccagauuucuag

SEQ ID NO: 8799 - RNA, 19 nt, artificial
  Oligomer
cuuccuaaaccugucacuc

SEQ ID NO: 8800 - RNA, 19 nt, artificial
  Oligomer
uugacacuccaaacuccug

SEQ ID NO: 8801 - RNA, 19 nt, artificial
  Oligomer
uuuuaaaguggaggguuug

SEQ ID NO: 8802 - RNA, 19 nt, artificial
  Oligomer
ucuuacuugugauugugcc

SEQ ID NO: 8803 - RNA, 19 nt, artificial
  Oligomer
uaccuguaaagucuuacuu

SEQ ID NO: 8804 - RNA, 19 nt, artificial
  Oligomer
cuggaguagaaaccaaaug

SEQ ID NO: 8805 - RNA, 19 nt, artificial
  Oligomer
cccaaaaguaaucgcucug

SEQ ID NO: 8806 - RNA, 19 nt, artificial
  Oligomer
uuuuuugggcggaggaugc

SEQ ID NO: 8807 - RNA, 19 nt, artificial
  Oligomer
aaaccugucacucaagagg

SEQ ID NO: 8808 - RNA, 19 nt, artificial
  Oligomer
uauuucccuguuuguguuu

SEQ ID NO: 8809 - RNA, 19 nt, artificial
  Oligomer
cagaaagaaaugcucuugc

SEQ ID NO: 8810 - RNA, 19 nt, artificial
  Oligomer
agcccaaaaguaaucgcuc

SEQ ID NO: 8811 - RNA, 19 nt, artificial
  Oligomer
auggauugccguuuguacc

SEQ ID NO: 8812 - RNA, 19 nt, artificial
  Oligomer
auuaccauuuuuaaagcgg

SEQ ID NO: 8813 - RNA, 19 nt, artificial
  Oligomer
augggaauccagcuuuuug

SEQ ID NO: 8814 - RNA, 19 nt, artificial
  Oligomer
uuugauggcagaaucacug

SEQ ID NO: 8815 - RNA, 19 nt, artificial
  Oligomer
aguuugauggcagaaucac

SEQ ID NO: 8816 - RNA, 19 nt, artificial
  Oligomer
aaguggaggguuugucucu

SEQ ID NO: 8817 - RNA, 19 nt, artificial
  Oligomer
uuuuggucccuugccucuu

SEQ ID NO: 8818 - RNA, 19 nt, artificial
  Oligomer
uuaaaugccagcaaaaagc

SEQ ID NO: 8819 - RNA, 19 nt, artificial
  Oligomer
uuuuuuguuuggcacaauc

SEQ ID NO: 8820 - RNA, 19 nt, artificial
  Oligomer
auccuuaugcucuugaccc

SEQ ID NO: 8821 - RNA, 19 nt, artificial
  Oligomer
uuuccauuccuucugucca

SEQ ID NO: 8822 - RNA, 19 nt, artificial
  Oligomer
uuuaaaaugcaagaggagg

SEQ ID NO: 8823 - RNA, 19 nt, artificial
  Oligomer
uuaaaaugcaagaggaggg

SEQ ID NO: 8824 - RNA, 19 nt, artificial
  Oligomer
uugaaauucuuugaggugg

SEQ ID NO: 8825 - RNA, 19 nt, artificial
  Oligomer
uuuaaaugccagcaaaaag

SEQ ID NO: 8826 - RNA, 19 nt, artificial
  Oligomer
uuuuguuuggcacaaucac

SEQ ID NO: 8827 - RNA, 19 nt, artificial
  Oligomer
uuuagaaaaacccaaaccu

SEQ ID NO: 8828 - RNA, 19 nt, artificial
  Oligomer
ucugccaucaaacucaaag

SEQ ID NO: 8829 - RNA, 19 nt, artificial
  Oligomer
uuuuuguuuggcacaauca

SEQ ID NO: 8830 - RNA, 19 nt, artificial
  Oligomer
uucaagugacauuuucuag

SEQ ID NO: 8831 - RNA, 19 nt, artificial
  Oligomer
auuccuucuguccacacac

SEQ ID NO: 8832 - RNA, 19 nt, artificial
  Oligomer
ugguaauuaguguugugcc

SEQ ID NO: 8833 - RNA, 19 nt, artificial
  Oligomer
uuuuagaaaaacccaaacc

SEQ ID NO: 8834 - RNA, 19 nt, artificial
  Oligomer
uuuacagguaagauguggc

SEQ ID NO: 8835 - RNA, 19 nt, artificial
  Oligomer
uucacuauuuaaaugccag

SEQ ID NO: 8836 - RNA, 19 nt, artificial
  Oligomer
uugagguggaagaggcaag

SEQ ID NO: 8837 - RNA, 19 nt, artificial
  Oligomer
uuuguuuggcacaaucaca

SEQ ID NO: 8838 - RNA, 19 nt, artificial
  Oligomer
auuacaaucgaccuuucag

SEQ ID NO: 8839 - RNA, 19 nt, artificial
  Oligomer
uagaaaaacccaaaccuag

SEQ ID NO: 8840 - RNA, 19 nt, artificial
  Oligomer
uuuuuacacagcaauacug

SEQ ID NO: 8841 - RNA, 19 nt, artificial
  Oligomer
uucccaucagugauucugc

SEQ ID NO: 8842 - RNA, 19 nt, artificial
  Oligomer
uucacauuugguuucuacu

SEQ ID NO: 8843 - RNA, 19 nt, artificial
  Oligomer
uccagagcgauuacuuuug

SEQ ID NO: 8844 - RNA, 19 nt, artificial
  Oligomer
uuccauaaugccuuacacu

SEQ ID NO: 8845 - RNA, 19 nt, artificial
  Oligomer
uuccuucuguccacacacc

SEQ ID NO: 8846 - RNA, 19 nt, artificial
  Oligomer
uugacccagauacugacag

SEQ ID NO: 8847 - RNA, 19 nt, artificial
  Oligomer
uuucuuucuggcacauuuu

SEQ ID NO: 8848 - RNA, 19 nt, artificial
  Oligomer
uuugguuucuacuccagag

SEQ ID NO: 8849 - RNA, 19 nt, artificial
  Oligomer
ucuucaagugacauuuucu

SEQ ID NO: 8850 - RNA, 19 nt, artificial
  Oligomer
uuuaggaaggguccagcag

SEQ ID NO: 8851 - RNA, 19 nt, artificial
  Oligomer
auuucuuucuggcacauuu

SEQ ID NO: 8852 - RNA, 19 nt, artificial
  Oligomer
uuucuggcacauuuuuugu

SEQ ID NO: 8853 - RNA, 19 nt, artificial
  Oligomer
uuuacgagucaguggaugg

SEQ ID NO: 8854 - RNA, 19 nt, artificial
  Oligomer
ucaagugacauuuucuaga

SEQ ID NO: 8855 - RNA, 19 nt, artificial
  Oligomer
uuguuuggcacaaucacaa

SEQ ID NO: 8856 - RNA, 19 nt, artificial
  Oligomer
uuuggcacaaucacaagua

SEQ ID NO: 8857 - RNA, 19 nt, artificial
  Oligomer
uucaguuacaaacaagguu

SEQ ID NO: 8858 - RNA, 19 nt, artificial
  Oligomer
ucuaaguaggagacuaagg

SEQ ID NO: 8859 - RNA, 19 nt, artificial
  Oligomer
uccauaaugccuuacacuu

SEQ ID NO: 8860 - RNA, 19 nt, artificial
  Oligomer
auuacuuuugggcuaaaca

SEQ ID NO: 8861 - RNA, 19 nt, artificial
  Oligomer
uuuuugugaaaauggguac

SEQ ID NO: 8862 - RNA, 19 nt, artificial
  Oligomer
ucuuucuggcacauuuuuu

SEQ ID NO: 8863 - RNA, 19 nt, artificial
  Oligomer
uuacuuuugggcuaaacaa

SEQ ID NO: 8864 - RNA, 19 nt, artificial
  Oligomer
uccuucuguccacacacca

SEQ ID NO: 8865 - RNA, 19 nt, artificial
  Oligomer
aucgguuaaaugaaguccg

SEQ ID NO: 8866 - RNA, 19 nt, artificial
  Oligomer
augaaguccguaaacaggc

SEQ ID NO: 8867 - RNA, 19 nt, artificial
  Oligomer
uugggaguccuugucacaa

SEQ ID NO: 8868 - RNA, 19 nt, artificial
  Oligomer
cuuucaguuacaaacaagg

SEQ ID NO: 8869 - RNA, 19 nt, artificial
  Oligomer
ucaguuacaaacaagguuu

SEQ ID NO: 8870 - RNA, 19 nt, artificial
  Oligomer
uagaauaucucuaaguagg

SEQ ID NO: 8871 - RNA, 19 nt, artificial
  Oligomer
ucaaguucacauauacacu

SEQ ID NO: 8872 - RNA, 19 nt, artificial
  Oligomer
aaccaaaacacaaacaggg

SEQ ID NO: 8873 - RNA, 19 nt, artificial
  Oligomer
uuacuuggaaaguugagga

SEQ ID NO: 8874 - RNA, 19 nt, artificial
  Oligomer
cuuucuggcacauuuuuug

SEQ ID NO: 8875 - RNA, 19 nt, artificial
  Oligomer
aaugaaguccguaaacagg

SEQ ID NO: 8876 - RNA, 19 nt, artificial
  Oligomer
uacagaauuuuuacacagc

SEQ ID NO: 8877 - RNA, 19 nt, artificial
  Oligomer
uuacaacuuaauaccgcuu

SEQ ID NO: 8878 - RNA, 19 nt, artificial
  Oligomer
aaauacuuccucuucaagu

SEQ ID NO: 8879 - RNA, 19 nt, artificial
  Oligomer
agagccuugaaauucuuug

SEQ ID NO: 8880 - RNA, 19 nt, artificial
  Oligomer
aaaaaagccaaaucaaacc

SEQ ID NO: 8881 - RNA, 19 nt, artificial
  Oligomer
ugggcaagugugaugcauc

SEQ ID NO: 8882 - RNA, 19 nt, artificial
  Oligomer
uccucuucaagugacauuu

SEQ ID NO: 8883 - RNA, 19 nt, artificial
  Oligomer
uggagugucaaguucacau

SEQ ID NO: 8884 - RNA, 19 nt, artificial
  Oligomer
auucccaucagugauucug

SEQ ID NO: 8885 - RNA, 19 nt, artificial
  Oligomer
uuuugugaaaauggguacg

SEQ ID NO: 8886 - RNA, 19 nt, artificial
  Oligomer
uuucaguuacaaacaaggu

SEQ ID NO: 8887 - RNA, 19 nt, artificial
  Oligomer
uuggcuuuccauuccuucu

SEQ ID NO: 8888 - RNA, 19 nt, artificial
  Oligomer
uucuuucuggcacauuuuu

SEQ ID NO: 8889 - RNA, 19 nt, artificial
  Oligomer
uacuccagagcgauuacuu

SEQ ID NO: 8890 - RNA, 19 nt, artificial
  Oligomer
acaugccuccaccacauug

SEQ ID NO: 8891 - RNA, 19 nt, artificial
  Oligomer
uuagaaaaacccaaaccua

SEQ ID NO: 8892 - RNA, 19 nt, artificial
  Oligomer
aaugccagcaaaaagcugg

SEQ ID NO: 8893 - RNA, 19 nt, artificial
  Oligomer
ugugcaaauccuuaugcuc

SEQ ID NO: 8894 - RNA, 19 nt, artificial
  Oligomer
uuucuacuccagagcgauu

SEQ ID NO: 8895 - RNA, 19 nt, artificial
  Oligomer
aagugugaugcauccuccg

SEQ ID NO: 8896 - RNA, 19 nt, artificial
  Oligomer
ugauacagguacaaacggc

SEQ ID NO: 8897 - RNA, 19 nt, artificial
  Oligomer
aauuacaacuuaauaccgc

SEQ ID NO: 8898 - RNA, 19 nt, artificial
  Oligomer
auaggugugcaaauccuua

SEQ ID NO: 8899 - RNA, 19 nt, artificial
  Oligomer
accaguuccauaaugccuu

SEQ ID NO: 8900 - RNA, 19 nt, artificial
  Oligomer
aagagcauuucuuucuggc

SEQ ID NO: 8901 - RNA, 19 nt, artificial
  Oligomer
aucacaaguaagacuuuac

SEQ ID NO: 8902 - RNA, 19 nt, artificial
  Oligomer
uaaauacuuccucuucaag

SEQ ID NO: 8903 - RNA, 19 nt, artificial
  Oligomer
agugauucugccaucaaac

SEQ ID NO: 8904 - RNA, 19 nt, artificial
  Oligomer
uuugagguggaagaggcaa

SEQ ID NO: 8905 - RNA, 19 nt, artificial
  Oligomer
aauguuacuuggaaaguug

SEQ ID NO: 8906 - RNA, 19 nt, artificial
  Oligomer
uucuggcacauuuuuuguu

SEQ ID NO: 8907 - RNA, 19 nt, artificial
  Oligomer
acaaguaagacuuuacagg

SEQ ID NO: 8908 - RNA, 19 nt, artificial
  Oligomer
acggcaauccauuacaauc

SEQ ID NO: 8909 - RNA, 19 nt, artificial
  Oligomer
auuacaacuuaauaccgcu

SEQ ID NO: 8910 - RNA, 19 nt, artificial
  Oligomer
aaugguaauuaguguugug

SEQ ID NO: 8911 - RNA, 19 nt, artificial
  Oligomer
uguugugccagauuaaaau

SEQ ID NO: 8912 - RNA, 19 nt, artificial
  Oligomer
auaaaguaagguaagagcc

SEQ ID NO: 8913 - RNA, 19 nt, artificial
  Oligomer
uguagguguauuugugcgg

SEQ ID NO: 8914 - RNA, 19 nt, artificial
  Oligomer
auaagaaccaguuccauaa

SEQ ID NO: 8915 - RNA, 19 nt, artificial
  Oligomer
ugaggaagcaagagcauuu

SEQ ID NO: 8916 - RNA, 19 nt, artificial
  Oligomer
ucuggcacauuuuuuguuu

SEQ ID NO: 8917 - RNA, 19 nt, artificial
  Oligomer
uaagauguggcuauucaca

SEQ ID NO: 8918 - RNA, 19 nt, artificial
  Oligomer
uccuccgcccaaaaaaugg

SEQ ID NO: 8919 - RNA, 19 nt, artificial
  Oligomer
ugauucugccaucaaacuc

SEQ ID NO: 8920 - RNA, 19 nt, artificial
  Oligomer
aauaccgcuuuaaaaaugg

SEQ ID NO: 8921 - RNA, 19 nt, artificial
  Oligomer
ugucaaguucacauauaca

SEQ ID NO: 8922 - RNA, 19 nt, artificial
  Oligomer
aaccaguuccauaaugccu

SEQ ID NO: 8923 - RNA, 19 nt, artificial
  Oligomer
uugaggaagcaagagcauu

SEQ ID NO: 8924 - RNA, 19 nt, artificial
  Oligomer
agagcgauuacuuuugggc

SEQ ID NO: 8925 - RNA, 19 nt, artificial
  Oligomer
ugggcuaaacaaauaaauc

SEQ ID NO: 8926 - RNA, 19 nt, artificial
  Oligomer
auccuccgcccaaaaaaug

SEQ ID NO: 8927 - RNA, 19 nt, artificial
  Oligomer
ucucccaguuugcccauag

SEQ ID NO: 8928 - RNA, 19 nt, artificial
  Oligomer
aacagcagagcugaagucc

SEQ ID NO: 8929 - RNA, 19 nt, artificial
  Oligomer
uuaugcucuugacccagau

SEQ ID NO: 8930 - RNA, 19 nt, artificial
  Oligomer
auuaguguugugccagauu

SEQ ID NO: 8931 - RNA, 19 nt, artificial
  Oligomer
aucaaaccaaaacacaaac

SEQ ID NO: 8932 - RNA, 19 nt, artificial
  Oligomer
ugccuuacacuucauauuu

SEQ ID NO: 8933 - RNA, 19 nt, artificial
  Oligomer
uggaacuuuacgagucagu

SEQ ID NO: 8934 - RNA, 19 nt, artificial
  Oligomer
acagguacaaacggcaauc

SEQ ID NO: 8935 - RNA, 19 nt, artificial
  Oligomer
uacaaucgaccuuucaguu

SEQ ID NO: 8936 - RNA, 19 nt, artificial
  Oligomer
ggaagagaaauggacaaaa

SEQ ID NO: 8937 - RNA, 19 nt, artificial
  Oligomer
auggguacguuuuugacau

SEQ ID NO: 8938 - RNA, 19 nt, artificial
  Oligomer
uuuggagugucaaguucac

SEQ ID NO: 8939 - RNA, 19 nt, artificial
  Oligomer
uuggagugucaaguucaca

SEQ ID NO: 8940 - RNA, 19 nt, artificial
  Oligomer
ucccaucagugauucugcc

SEQ ID NO: 8941 - RNA, 19 nt, artificial
  Oligomer
uccacuuuaaaaugcaaga

SEQ ID NO: 8942 - RNA, 19 nt, artificial
  Oligomer
aagcaagagcauuucuuuc

SEQ ID NO: 8943 - RNA, 19 nt, artificial
  Oligomer
uggcacauuuuuuguuugg

SEQ ID NO: 8944 - RNA, 19 nt, artificial
  Oligomer
caaaaaauggaacuuuacg

SEQ ID NO: 8945 - RNA, 19 nt, artificial
  Oligomer
aaaagcuggauucccauca

SEQ ID NO: 8946 - RNA, 19 nt, artificial
  Oligomer
uucuuugagguggaagagg

SEQ ID NO: 8947 - RNA, 19 nt, artificial
  Oligomer
uggcacaaucacaaguaag

SEQ ID NO: 8948 - RNA, 19 nt, artificial
  Oligomer
auuugguuucuacuccaga

SEQ ID NO: 8949 - RNA, 19 nt, artificial
  Oligomer
aaaugaaguccguaaacag

SEQ ID NO: 8950 - RNA, 19 nt, artificial
  Oligomer
aaaaauggaacuuuacgag

SEQ ID NO: 8951 - RNA, 19 nt, artificial
  Oligomer
uuuuacacagcaauacuga

SEQ ID NO: 8952 - RNA, 19 nt, artificial
  Oligomer
uggcuuuccauuccuucug

SEQ ID NO: 8953 - RNA, 19 nt, artificial
  Oligomer
augacaggaguuuggagug

SEQ ID NO: 8954 - RNA, 19 nt, artificial
  Oligomer
cuccacuuuaaaaugcaag

SEQ ID NO: 8955 - RNA, 19 nt, artificial
  Oligomer
aaugccuuacacuucauau

SEQ ID NO: 8956 - RNA, 19 nt, artificial
  Oligomer
acaaucacaaguaagacuu

SEQ ID NO: 8957 - RNA, 19 nt, artificial
  Oligomer
aaauggaacuuuacgaguc

SEQ ID NO: 8958 - RNA, 19 nt, artificial
  Oligomer
ugccaugacaggaguuugg

SEQ ID NO: 8959 - RNA, 19 nt, artificial
  Oligomer
ucuuugagguggaagaggc

SEQ ID NO: 8960 - RNA, 19 nt, artificial
  Oligomer
ucauuuuugugaaaauggg

SEQ ID NO: 8961 - RNA, 19 nt, artificial
  Oligomer
uuugugaaaauggguacgu

SEQ ID NO: 8962 - RNA, 19 nt, artificial
  Oligomer
ugguuucuacuccagagcg

SEQ ID NO: 8963 - RNA, 19 nt, artificial
  Oligomer
auacugacagcacagcaca

SEQ ID NO: 8964 - RNA, 19 nt, artificial
  Oligomer
aauccauuacaaucgaccu

SEQ ID NO: 8965 - RNA, 19 nt, artificial
  Oligomer
aaaccuagaaaucuggacu

SEQ ID NO: 8966 - RNA, 19 nt, artificial
  Oligomer
uccauuccuucuguccaca

SEQ ID NO: 8967 - RNA, 19 nt, artificial
  Oligomer
cucauuuuugugaaaaugg

SEQ ID NO: 8968 - RNA, 19 nt, artificial
  Oligomer
uguggcuauucacauuugg

SEQ ID NO: 8969 - RNA, 19 nt, artificial
  Oligomer
accacauugggaguccuug

SEQ ID NO: 8970 - RNA, 19 nt, artificial
  Oligomer
acugauacagguacaaacg

SEQ ID NO: 8971 - RNA, 19 nt, artificial
  Oligomer
acccaaaccuagaaaucug

SEQ ID NO: 8972 - RNA, 19 nt, artificial
  Oligomer
agugacagguuuaggaagg

SEQ ID NO: 8973 - RNA, 19 nt, artificial
  Oligomer
aauaagaaccaguuccaua

SEQ ID NO: 8974 - RNA, 19 nt, artificial
  Oligomer
augccuuacacuucauauu

SEQ ID NO: 8975 - RNA, 19 nt, artificial
  Oligomer
auugggaguccuugucaca

SEQ ID NO: 8976 - RNA, 19 nt, artificial
  Oligomer
auccauuacaaucgaccuu

SEQ ID NO: 8977 - RNA, 19 nt, artificial
  Oligomer
guaauuaguguugugccag

SEQ ID NO: 8978 - RNA, 19 nt, artificial
  Oligomer
aaacucaaagagacaaacc

SEQ ID NO: 8979 - RNA, 19 nt, artificial
  Oligomer
agcuguagguguauuugug

SEQ ID NO: 8980 - RNA, 19 nt, artificial
  Oligomer
uccuuaugcucuugaccca

SEQ ID NO: 8981 - RNA, 19 nt, artificial
  Oligomer
aaaccaaaacacaaacagg

SEQ ID NO: 8982 - RNA, 19 nt, artificial
  Oligomer
cgaccuuucaguuacaaac

SEQ ID NO: 8983 - RNA, 19 nt, artificial
  Oligomer
aaaaagcuggauucccauc

SEQ ID NO: 8984 - RNA, 19 nt, artificial
  Oligomer
agcuggauucccaucagug

SEQ ID NO: 8985 - RNA, 19 nt, artificial
  Oligomer
aaaugcaagaggagggaag

SEQ ID NO: 8986 - RNA, 19 nt, artificial
  Oligomer
ugugaaaauggguacguuu

SEQ ID NO: 8987 - RNA, 19 nt, artificial
  Oligomer
uuacagguaagauguggcu

SEQ ID NO: 8988 - RNA, 19 nt, artificial
  Oligomer
uacagguacaaacggcaau

SEQ ID NO: 8989 - RNA, 19 nt, artificial
  Oligomer
cccauaggugugcaaaucc

SEQ ID NO: 8990 - RNA, 19 nt, artificial
  Oligomer
aucagugauucugccauca

SEQ ID NO: 8991 - RNA, 19 nt, artificial
  Oligomer
aaacccuccacuuuaaaau

SEQ ID NO: 8992 - RNA, 19 nt, artificial
  Oligomer
agacuuuacagguaagaug

SEQ ID NO: 8993 - RNA, 19 nt, artificial
  Oligomer
ucgaccuuucaguuacaaa

SEQ ID NO: 8994 - RNA, 19 nt, artificial
  Oligomer
auuuggcuuuccauuccuu

SEQ ID NO: 8995 - RNA, 19 nt, artificial
  Oligomer
acagguuuaggaagggucc

SEQ ID NO: 8996 - RNA, 19 nt, artificial
  Oligomer
gagggaagagaaauggaca

SEQ ID NO: 8997 - RNA, 19 nt, artificial
  Oligomer
uaaaguaagguaagagccu

SEQ ID NO: 8998 - RNA, 19 nt, artificial
  Oligomer
uaagguaagagccuugaaa

SEQ ID NO: 8999 - RNA, 19 nt, artificial
  Oligomer
guuacuuggaaaguugagg

SEQ ID NO: 9000 - RNA, 19 nt, artificial
  Oligomer
ucacaaguaagacuuuaca

SEQ ID NO: 9001 - RNA, 19 nt, artificial
  Oligomer
uggcuauucacauuugguu

SEQ ID NO: 9002 - RNA, 19 nt, artificial
  Oligomer
cuccagagcgauuacuuuu

SEQ ID NO: 9003 - RNA, 19 nt, artificial
  Oligomer
acagaauuuuuacacagca

SEQ ID NO: 9004 - RNA, 19 nt, artificial
  Oligomer
uacaaacggcaauccauua

SEQ ID NO: 9005 - RNA, 19 nt, artificial
  Oligomer
gacagguuuaggaaggguc

SEQ ID NO: 9006 - RNA, 19 nt, artificial
  Oligomer
uagcuuccgugccaugaca

SEQ ID NO: 9007 - RNA, 19 nt, artificial
  Oligomer
gaaaaaagccaaaucaaac

SEQ ID NO: 9008 - RNA, 19 nt, artificial
  Oligomer
ucaaaccaaaacacaaaca

SEQ ID NO: 9009 - RNA, 19 nt, artificial
  Oligomer
ugcucuugacccagauacu

SEQ ID NO: 9010 - RNA, 19 nt, artificial
  Oligomer
cucuugacccagauacuga

SEQ ID NO: 9011 - RNA, 19 nt, artificial
  Oligomer
ugacccagauacugacagc

SEQ ID NO: 9012 - RNA, 19 nt, artificial
  Oligomer
uaguguugugccagauuaa

SEQ ID NO: 9013 - RNA, 19 nt, artificial
  Oligomer
aacccaaaccuagaaaucu

SEQ ID NO: 9014 - RNA, 19 nt, artificial
  Oligomer
aagagacaaacccuccacu

SEQ ID NO: 9015 - RNA, 19 nt, artificial
  Oligomer
aaguaagguaagagccuug

SEQ ID NO: 9016 - RNA, 19 nt, artificial
  Oligomer
aauggguacguuuuugaca

SEQ ID NO: 9017 - RNA, 19 nt, artificial
  Oligomer
agccaaaucaaaccaaaac

SEQ ID NO: 9018 - RNA, 19 nt, artificial
  Oligomer
uaugcucuugacccagaua

SEQ ID NO: 9019 - RNA, 19 nt, artificial
  Oligomer
auguuacuuggaaaguuga

SEQ ID NO: 9020 - RNA, 19 nt, artificial
  Oligomer
ucuacuccagagcgauuac

SEQ ID NO: 9021 - RNA, 19 nt, artificial
  Oligomer
uccgcccaaaaaauggaac

SEQ ID NO: 9022 - RNA, 19 nt, artificial
  Oligomer
acagcaauacugauacagg

SEQ ID NO: 9023 - RNA, 19 nt, artificial
  Oligomer
uaccgcuuuaaaaauggua

SEQ ID NO: 9024 - RNA, 19 nt, artificial
  Oligomer
aauacuuccucuucaagug

SEQ ID NO: 9025 - RNA, 19 nt, artificial
  Oligomer
ggagggaagagaaauggac

SEQ ID NO: 9026 - RNA, 19 nt, artificial
  Oligomer
acauuuuuuguuuggcaca

SEQ ID NO: 9027 - RNA, 19 nt, artificial
  Oligomer
uaagacuuuacagguaaga

SEQ ID NO: 9028 - RNA, 19 nt, artificial
  Oligomer
aaaauggaacuuuacgagu

SEQ ID NO: 9029 - RNA, 19 nt, artificial
  Oligomer
cuaaguaggagacuaagga

SEQ ID NO: 9030 - RNA, 19 nt, artificial
  Oligomer
cuggacuaaauuaauuugg

SEQ ID NO: 9031 - RNA, 19 nt, artificial
  Oligomer
aggaguuuggagugucaag

SEQ ID NO: 9032 - RNA, 19 nt, artificial
  Oligomer
ugccaucaaacucaaagag

SEQ ID NO: 9033 - RNA, 19 nt, artificial
  Oligomer
gaagagaaauggacaaaaa

SEQ ID NO: 9034 - RNA, 19 nt, artificial
  Oligomer
auggaacuuuacgagucag

SEQ ID NO: 9035 - RNA, 19 nt, artificial
  Oligomer
cugauacagguacaaacgg

SEQ ID NO: 9036 - RNA, 19 nt, artificial
  Oligomer
uacgagucaguggauggca

SEQ ID NO: 9037 - RNA, 19 nt, artificial
  Oligomer
aauaucucuaaguaggaga

SEQ ID NO: 9038 - RNA, 19 nt, artificial
  Oligomer
agaaaaacccaaaccuaga

SEQ ID NO: 9039 - RNA, 19 nt, artificial
  Oligomer
uggacuaaauuaauuuggc

SEQ ID NO: 9040 - RNA, 19 nt, artificial
  Oligomer
uugcccauaggugugcaaa

SEQ ID NO: 9041 - RNA, 19 nt, artificial
  Oligomer
agcaaaaagcuggauuccc

SEQ ID NO: 9042 - RNA, 19 nt, artificial
  Oligomer
aacccuccacuuuaaaaug

SEQ ID NO: 9043 - RNA, 19 nt, artificial
  Oligomer
acccuccacuuuaaaaugc

SEQ ID NO: 9044 - RNA, 19 nt, artificial
  Oligomer
uaaaaugcaagaggaggga

SEQ ID NO: 9045 - RNA, 19 nt, artificial
  Oligomer
gugcaaauccuuaugcucu

SEQ ID NO: 9046 - RNA, 19 nt, artificial
  Oligomer
guaagagccuugaaauucu

SEQ ID NO: 9047 - RNA, 19 nt, artificial
  Oligomer
ugaaauucuuugaggugga

SEQ ID NO: 9048 - RNA, 19 nt, artificial
  Oligomer
agggaccaaaagcuguagg

SEQ ID NO: 9049 - RNA, 19 nt, artificial
  Oligomer
gcuguagguguauuugugc

SEQ ID NO: 9050 - RNA, 19 nt, artificial
  Oligomer
ccuuaugcucuugacccag

SEQ ID NO: 9051 - RNA, 19 nt, artificial
  Oligomer
aaaaagccaaaucaaacca

SEQ ID NO: 9052 - RNA, 19 nt, artificial
  Oligomer
acacaaacagggaaauaag

SEQ ID NO: 9053 - RNA, 19 nt, artificial
  Oligomer
agaaccaguuccauaaugc

SEQ ID NO: 9054 - RNA, 19 nt, artificial
  Oligomer
guuuggcacaaucacaagu

SEQ ID NO: 9055 - RNA, 19 nt, artificial
  Oligomer
acccagauacugacagcac

SEQ ID NO: 9056 - RNA, 19 nt, artificial
  Oligomer
uacuuccucuucaagugac

SEQ ID NO: 9057 - RNA, 19 nt, artificial
  Oligomer
uaucucuaaguaggagacu

SEQ ID NO: 9058 - RNA, 19 nt, artificial
  Oligomer
aaguccucuugagugacag

SEQ ID NO: 9059 - RNA, 19 nt, artificial
  Oligomer
uccucuugagugacagguu

SEQ ID NO: 9060 - RNA, 19 nt, artificial
  Oligomer
ucaaacucaaagagacaaa

SEQ ID NO: 9061 - RNA, 19 nt, artificial
  Oligomer
cacauuuuuuguuuggcac

SEQ ID NO: 9062 - RNA, 19 nt, artificial
  Oligomer
gggcuaaacaaauaaaucg

SEQ ID NO: 9063 - RNA, 19 nt, artificial
  Oligomer
guacaaacggcaauccauu

SEQ ID NO: 9064 - RNA, 19 nt, artificial
  Oligomer
aaacccaaaccuagaaauc

SEQ ID NO: 9065 - RNA, 19 nt, artificial
  Oligomer
aaguucacauauacacucu

SEQ ID NO: 9066 - RNA, 19 nt, artificial
  Oligomer
uguuacuuggaaaguugag

SEQ ID NO: 9067 - RNA, 19 nt, artificial
  Oligomer
agauacugacagcacagca

SEQ ID NO: 9068 - RNA, 19 nt, artificial
  Oligomer
cuugagugacagguuuagg

SEQ ID NO: 9069 - RNA, 19 nt, artificial
  Oligomer
aaauucuuugagguggaag

SEQ ID NO: 9070 - RNA, 19 nt, artificial
  Oligomer
guuccauaaugccuuacac

SEQ ID NO: 9071 - RNA, 19 nt, artificial
  Oligomer
agcaagagcauuucuuucu

SEQ ID NO: 9072 - RNA, 19 nt, artificial
  Oligomer
uguuuggcacaaucacaag

SEQ ID NO: 9073 - RNA, 19 nt, artificial
  Oligomer
acuccagagcgauuacuuu

SEQ ID NO: 9074 - RNA, 19 nt, artificial
  Oligomer
uacuuuugggcuaaacaaa

SEQ ID NO: 9075 - RNA, 19 nt, artificial
  Oligomer
augcauccuccgcccaaaa

SEQ ID NO: 9076 - RNA, 19 nt, artificial
  Oligomer
aauggaacuuuacgaguca

SEQ ID NO: 9077 - RNA, 19 nt, artificial
  Oligomer
cggcaauccauuacaaucg

SEQ ID NO: 9078 - RNA, 19 nt, artificial
  Oligomer
ugagugacagguuuaggaa

SEQ ID NO: 9079 - RNA, 19 nt, artificial
  Oligomer
uucugccaucaaacucaaa

SEQ ID NO: 9080 - RNA, 19 nt, artificial
  Oligomer
aucaaacucaaagagacaa

SEQ ID NO: 9081 - RNA, 19 nt, artificial
  Oligomer
agggaagagaaauggacaa

SEQ ID NO: 9082 - RNA, 19 nt, artificial
  Oligomer
aauucuuugagguggaaga

SEQ ID NO: 9083 - RNA, 19 nt, artificial
  Oligomer
cuguagguguauuugugcg

SEQ ID NO: 9084 - RNA, 19 nt, artificial
  Oligomer
aaaauggguacguuuuuga

SEQ ID NO: 9085 - RNA, 19 nt, artificial
  Oligomer
aagaaccaguuccauaaug

SEQ ID NO: 9086 - RNA, 19 nt, artificial
  Oligomer
gcucuugacccagauacug

SEQ ID NO: 9087 - RNA, 19 nt, artificial
  Oligomer
cuuuacagguaagaugugg

SEQ ID NO: 9088 - RNA, 19 nt, artificial
  Oligomer
uacagguaagauguggcua

SEQ ID NO: 9089 - RNA, 19 nt, artificial
  Oligomer
ugaaguccguaaacaggcc

SEQ ID NO: 9090 - RNA, 19 nt, artificial
  Oligomer
ugggaguccuugucacaag

SEQ ID NO: 9091 - RNA, 19 nt, artificial
  Oligomer
gcaagugugaugcauccuc

SEQ ID NO: 9092 - RNA, 19 nt, artificial
  Oligomer
uuuacacagcaauacugau

SEQ ID NO: 9093 - RNA, 19 nt, artificial
  Oligomer
gauacagguacaaacggca

SEQ ID NO: 9094 - RNA, 19 nt, artificial
  Oligomer
auacagguacaaacggcaa

SEQ ID NO: 9095 - RNA, 19 nt, artificial
  Oligomer
agguuuaggaaggguccag

SEQ ID NO: 9096 - RNA, 19 nt, artificial
  Oligomer
agaggagggaagagaaaug

SEQ ID NO: 9097 - RNA, 19 nt, artificial
  Oligomer
cuuaugcucuugacccaga

SEQ ID NO: 9098 - RNA, 19 nt, artificial
  Oligomer
gacauuuaagaaaaaagcc

SEQ ID NO: 9099 - RNA, 19 nt, artificial
  Oligomer
caguacuguuauuauucug

SEQ ID NO: 9100 - RNA, 19 nt, artificial
  Oligomer
gugccaugacaggaguuug

SEQ ID NO: 9101 - RNA, 19 nt, artificial
  Oligomer
guuuggagugucaaguuca

SEQ ID NO: 9102 - RNA, 19 nt, artificial
  Oligomer
uaaaugccagcaaaaagcu

SEQ ID NO: 9103 - RNA, 19 nt, artificial
  Oligomer
acucaaagagacaaacccu

SEQ ID NO: 9104 - RNA, 19 nt, artificial
  Oligomer
augcaagaggagggaagag

SEQ ID NO: 9105 - RNA, 19 nt, artificial
  Oligomer
uugugaaaauggguacguu

SEQ ID NO: 9106 - RNA, 19 nt, artificial
  Oligomer
ggaaauaagaaccaguucc

SEQ ID NO: 9107 - RNA, 19 nt, artificial
  Oligomer
aguugaggaagcaagagca

SEQ ID NO: 9108 - RNA, 19 nt, artificial
  Oligomer
aagauguggcuauucacau

SEQ ID NO: 9109 - RNA, 19 nt, artificial
  Oligomer
ugcauccuccgcccaaaaa

SEQ ID NO: 9110 - RNA, 19 nt, artificial
  Oligomer
ggaacuuuacgagucagug

SEQ ID NO: 9111 - RNA, 19 nt, artificial
  Oligomer
ugucucccaguuugcccau

SEQ ID NO: 9112 - RNA, 19 nt, artificial
  Oligomer
ucccaguuugcccauaggu

SEQ ID NO: 9113 - RNA, 19 nt, artificial
  Oligomer
ugacagguuuaggaagggu

SEQ ID NO: 9114 - RNA, 19 nt, artificial
  Oligomer
cacuauuuaaaugccagca

SEQ ID NO: 9115 - RNA, 19 nt, artificial
  Oligomer
acuauuuaaaugccagcaa

SEQ ID NO: 9116 - RNA, 19 nt, artificial
  Oligomer
gagcauuucuuucuggcac

SEQ ID NO: 9117 - RNA, 19 nt, artificial
  Oligomer
uacugacagcacagcacau

SEQ ID NO: 9118 - RNA, 19 nt, artificial
  Oligomer
augggcaagugugaugcau

SEQ ID NO: 9119 - RNA, 19 nt, artificial
  Oligomer
cucuaaguaggagacuaag

SEQ ID NO: 9120 - RNA, 19 nt, artificial
  Oligomer
ccaguuugcccauaggugu

SEQ ID NO: 9121 - RNA, 19 nt, artificial
  Oligomer
agcagagcugaaguccucu

SEQ ID NO: 9122 - RNA, 19 nt, artificial
  Oligomer
gcugaaguccucuugagug

SEQ ID NO: 9123 - RNA, 19 nt, artificial
  Oligomer
acaggaguuuggaguguca

SEQ ID NO: 9124 - RNA, 19 nt, artificial
  Oligomer
aguucacauauacacucuu

SEQ ID NO: 9125 - RNA, 19 nt, artificial
  Oligomer
auucuuugagguggaagag

SEQ ID NO: 9126 - RNA, 19 nt, artificial
  Oligomer
aagggaccaaaagcuguag

SEQ ID NO: 9127 - RNA, 19 nt, artificial
  Oligomer
ugaaaauggguacguuuuu

SEQ ID NO: 9128 - RNA, 19 nt, artificial
  Oligomer
caaaccaaaacacaaacag

SEQ ID NO: 9129 - RNA, 19 nt, artificial
  Oligomer
ggaaaguugaggaagcaag

SEQ ID NO: 9130 - RNA, 19 nt, artificial
  Oligomer
caaaugauauacaguacug

SEQ ID NO: 9131 - RNA, 19 nt, artificial
  Oligomer
guguugugccagauuaaaa

SEQ ID NO: 9132 - RNA, 19 nt, artificial
  Oligomer
acuuccucuucaagugaca

SEQ ID NO: 9133 - RNA, 19 nt, artificial
  Oligomer
auaucucuaaguaggagac

SEQ ID NO: 9134 - RNA, 19 nt, artificial
  Oligomer
cagagcugaaguccucuug

SEQ ID NO: 9135 - RNA, 19 nt, artificial
  Oligomer
ugaaguccucuugagugac

SEQ ID NO: 9136 - RNA, 19 nt, artificial
  Oligomer
uggauucccaucagugauu

SEQ ID NO: 9137 - RNA, 19 nt, artificial
  Oligomer
auucugccaucaaacucaa

SEQ ID NO: 9138 - RNA, 19 nt, artificial
  Oligomer
aggugugcaaauccuuaug

SEQ ID NO: 9139 - RNA, 19 nt, artificial
  Oligomer
ugcaaauccuuaugcucuu

SEQ ID NO: 9140 - RNA, 19 nt, artificial
  Oligomer
agaggcaagggaccaaaag

SEQ ID NO: 9141 - RNA, 19 nt, artificial
  Oligomer
acaaacagggaaauaagaa

SEQ ID NO: 9142 - RNA, 19 nt, artificial
  Oligomer
gaaccaguuccauaaugcc

SEQ ID NO: 9143 - RNA, 19 nt, artificial
  Oligomer
cuuggaaaguugaggaagc

SEQ ID NO: 9144 - RNA, 19 nt, artificial
  Oligomer
uuggaaaguugaggaagca

SEQ ID NO: 9145 - RNA, 19 nt, artificial
  Oligomer
cuggcacauuuuuuguuug

SEQ ID NO: 9146 - RNA, 19 nt, artificial
  Oligomer
acauuugguuucuacucca

SEQ ID NO: 9147 - RNA, 19 nt, artificial
  Oligomer
ggcuaaacaaauaaaucgg

SEQ ID NO: 9148 - RNA, 19 nt, artificial
  Oligomer
ucucuaaguaggagacuaa

SEQ ID NO: 9149 - RNA, 19 nt, artificial
  Oligomer
uaggagacuaaggaaaaaa

SEQ ID NO: 9150 - RNA, 19 nt, artificial
  Oligomer
acagcagagcugaaguccu

SEQ ID NO: 9151 - RNA, 19 nt, artificial
  Oligomer
guucacauauacacucuuu

SEQ ID NO: 9152 - RNA, 19 nt, artificial
  Oligomer
aaagcuggauucccaucag

SEQ ID NO: 9153 - RNA, 19 nt, artificial
  Oligomer
cugccaucaaacucaaaga

SEQ ID NO: 9154 - RNA, 19 nt, artificial
  Oligomer
aaauggguacguuuuugac

SEQ ID NO: 9155 - RNA, 19 nt, artificial
  Oligomer
cagggaaauaagaaccagu

SEQ ID NO: 9156 - RNA, 19 nt, artificial
  Oligomer
uggaaaguugaggaagcaa

SEQ ID NO: 9157 - RNA, 19 nt, artificial
  Oligomer
acagguaagauguggcuau

SEQ ID NO: 9158 - RNA, 19 nt, artificial
  Oligomer
auguggcuauucacauuug

SEQ ID NO: 9159 - RNA, 19 nt, artificial
  Oligomer
acuuuugggcuaaacaaau

SEQ ID NO: 9160 - RNA, 19 nt, artificial
  Oligomer
aauuaguguugugccagau

SEQ ID NO: 9161 - RNA, 19 nt, artificial
  Oligomer
cauuccuucuguccacaca

SEQ ID NO: 9162 - RNA, 19 nt, artificial
  Oligomer
aaugcaagaggagggaaga

SEQ ID NO: 9163 - RNA, 19 nt, artificial
  Oligomer
aggcaagggaccaaaagcu

SEQ ID NO: 9164 - RNA, 19 nt, artificial
  Oligomer
uagguguauuugugcggca

SEQ ID NO: 9165 - RNA, 19 nt, artificial
  Oligomer
ccucauuuuugugaaaaug

SEQ ID NO: 9166 - RNA, 19 nt, artificial
  Oligomer
cauugggaguccuugucac

SEQ ID NO: 9167 - RNA, 19 nt, artificial
  Oligomer
cacaaguaagacuuuacag

SEQ ID NO: 9168 - RNA, 19 nt, artificial
  Oligomer
cagguacaaacggcaaucc

SEQ ID NO: 9169 - RNA, 19 nt, artificial
  Oligomer
auacuuccucuucaaguga

SEQ ID NO: 9170 - RNA, 19 nt, artificial
  Oligomer
aaguaggagacuaaggaaa

SEQ ID NO: 9171 - RNA, 19 nt, artificial
  Oligomer
caguuugcccauaggugug

SEQ ID NO: 9172 - RNA, 19 nt, artificial
  Oligomer
guccucuugagugacaggu

SEQ ID NO: 9173 - RNA, 19 nt, artificial
  Oligomer
uuugcccauaggugugcaa

SEQ ID NO: 9174 - RNA, 19 nt, artificial
  Oligomer
guuuaggaaggguccagca

SEQ ID NO: 9175 - RNA, 19 nt, artificial
  Oligomer
caucagugauucugccauc

SEQ ID NO: 9176 - RNA, 19 nt, artificial
  Oligomer
aaaguugaggaagcaagag

SEQ ID NO: 9177 - RNA, 19 nt, artificial
  Oligomer
cuugacccagauacugaca

SEQ ID NO: 9178 - RNA, 19 nt, artificial
  Oligomer
caagagcauuucuuucugg

SEQ ID NO: 9179 - RNA, 19 nt, artificial
  Oligomer
uuggcacaaucacaaguaa

SEQ ID NO: 9180 - RNA, 19 nt, artificial
  Oligomer
ccuuucaguuacaaacaag

SEQ ID NO: 9181 - RNA, 19 nt, artificial
  Oligomer
cuuuacgagucaguggaug

SEQ ID NO: 9182 - RNA, 19 nt, artificial
  Oligomer
cuagaauaucucuaaguag

SEQ ID NO: 9183 - RNA, 19 nt, artificial
  Oligomer
aucucuaaguaggagacua

SEQ ID NO: 9184 - RNA, 19 nt, artificial
  Oligomer
ccauuccuucuguccacac

SEQ ID NO: 9185 - RNA, 19 nt, artificial
  Oligomer
cuugaaauucuuugaggug

SEQ ID NO: 9186 - RNA, 19 nt, artificial
  Oligomer
auaaugccuuacacuucau

SEQ ID NO: 9187 - RNA, 19 nt, artificial
  Oligomer
acuuggaaaguugaggaag

SEQ ID NO: 9188 - RNA, 19 nt, artificial
  Oligomer
caaguaagacuuuacaggu

SEQ ID NO: 9189 - RNA, 19 nt, artificial
  Oligomer
guuaaaugaaguccguaaa

SEQ ID NO: 9190 - RNA, 19 nt, artificial
  Oligomer
aucgaccuuucaguuacaa

SEQ ID NO: 9191 - RNA, 19 nt, artificial
  Oligomer
aguguugugccagauuaaa

SEQ ID NO: 9192 - RNA, 19 nt, artificial
  Oligomer
agaauaucucuaaguagga

SEQ ID NO: 9193 - RNA, 19 nt, artificial
  Oligomer
aaaacccaaaccuagaaau

SEQ ID NO: 9194 - RNA, 19 nt, artificial
  Oligomer
ugacaggaguuuggagugu

SEQ ID NO: 9195 - RNA, 19 nt, artificial
  Oligomer
aaaugccagcaaaaagcug

SEQ ID NO: 9196 - RNA, 19 nt, artificial
  Oligomer
ucagugauucugccaucaa

SEQ ID NO: 9197 - RNA, 19 nt, artificial
  Oligomer
guagguguauuugugcggc

SEQ ID NO: 9198 - RNA, 19 nt, artificial
  Oligomer
gccaaaucaaaccaaaaca

SEQ ID NO: 9199 - RNA, 19 nt, artificial
  Oligomer
cacaaucacaaguaagacu

SEQ ID NO: 9200 - RNA, 19 nt, artificial
  Oligomer
gagacuaaggaaaaaaaac

SEQ ID NO: 9201 - RNA, 19 nt, artificial
  Oligomer
aaaaacccaaaccuagaaa

SEQ ID NO: 9202 - RNA, 19 nt, artificial
  Oligomer
agcugaaguccucuugagu

SEQ ID NO: 9203 - RNA, 19 nt, artificial
  Oligomer
cauauacacucuuuucacu

SEQ ID NO: 9204 - RNA, 19 nt, artificial
  Oligomer
aagcuggauucccaucagu

SEQ ID NO: 9205 - RNA, 19 nt, artificial
  Oligomer
cacuuuaaaaugcaagagg

SEQ ID NO: 9206 - RNA, 19 nt, artificial
  Oligomer
ggacaaaaauaaaguaagg

SEQ ID NO: 9207 - RNA, 19 nt, artificial
  Oligomer
aagguaagagccuugaaau

SEQ ID NO: 9208 - RNA, 19 nt, artificial
  Oligomer
uaagagccuugaaauucuu

SEQ ID NO: 9209 - RNA, 19 nt, artificial
  Oligomer
aaaagccaaaucaaaccaa

SEQ ID NO: 9210 - RNA, 19 nt, artificial
  Oligomer
ccaaaucaaaccaaaacac

SEQ ID NO: 9211 - RNA, 19 nt, artificial
  Oligomer
agguaagauguggcuauuc

SEQ ID NO: 9212 - RNA, 19 nt, artificial
  Oligomer
gguaagauguggcuauuca

SEQ ID NO: 9213 - RNA, 19 nt, artificial
  Oligomer
gauguggcuauucacauuu

SEQ ID NO: 9214 - RNA, 19 nt, artificial
  Oligomer
aacggcaauccauuacaau

SEQ ID NO: 9215 - RNA, 19 nt, artificial
  Oligomer
aaucgaccuuucaguuaca

SEQ ID NO: 9216 - RNA, 19 nt, artificial
  Oligomer
agagcugaaguccucuuga

SEQ ID NO: 9217 - RNA, 19 nt, artificial
  Oligomer
aagaggagggaagagaaau

SEQ ID NO: 9218 - RNA, 19 nt, artificial
  Oligomer
aguaagguaagagccuuga

SEQ ID NO: 9219 - RNA, 19 nt, artificial
  Oligomer
gguaagagccuugaaauuc

SEQ ID NO: 9220 - RNA, 19 nt, artificial
  Oligomer
aagagccuugaaauucuuu

SEQ ID NO: 9221 - RNA, 19 nt, artificial
  Oligomer
caagggaccaaaagcugua

SEQ ID NO: 9222 - RNA, 19 nt, artificial
  Oligomer
agggaaauaagaaccaguu

SEQ ID NO: 9223 - RNA, 19 nt, artificial
  Oligomer
uaagaaccaguuccauaau

SEQ ID NO: 9224 - RNA, 19 nt, artificial
  Oligomer
cacuucauauuucuaucca

SEQ ID NO: 9225 - RNA, 19 nt, artificial
  Oligomer
acaacuuaauaccgcuuua

SEQ ID NO: 9226 - RNA, 19 nt, artificial
  Oligomer
accgcuuuaaaaaugguaa

SEQ ID NO: 9227 - RNA, 19 nt, artificial
  Oligomer
cuuccucuucaagugacau

SEQ ID NO: 9228 - RNA, 19 nt, artificial
  Oligomer
augccagcaaaaagcugga

SEQ ID NO: 9229 - RNA, 19 nt, artificial
  Oligomer
ccaucagugauucugccau

SEQ ID NO: 9230 - RNA, 19 nt, artificial
  Oligomer
gcaagggaccaaaagcugu

SEQ ID NO: 9231 - RNA, 19 nt, artificial
  Oligomer
gugaaaauggguacguuuu

SEQ ID NO: 9232 - RNA, 19 nt, artificial
  Oligomer
aaagccaaaucaaaccaaa

SEQ ID NO: 9233 - RNA, 19 nt, artificial
  Oligomer
aagccaaaucaaaccaaaa

SEQ ID NO: 9234 - RNA, 19 nt, artificial
  Oligomer
caaaucaaaccaaaacaca

SEQ ID NO: 9235 - RNA, 19 nt, artificial
  Oligomer
accaaaacacaaacaggga

SEQ ID NO: 9236 - RNA, 19 nt, artificial
  Oligomer
cauuucuuucuggcacauu

SEQ ID NO: 9237 - RNA, 19 nt, artificial
  Oligomer
cccagauacugacagcaca

SEQ ID NO: 9238 - RNA, 19 nt, artificial
  Oligomer
gauuacuuuugggcuaaac

SEQ ID NO: 9239 - RNA, 19 nt, artificial
  Oligomer
ucgguuaaaugaaguccgu

SEQ ID NO: 9240 - RNA, 19 nt, artificial
  Oligomer
cacagcaauacugauacag

SEQ ID NO: 9241 - RNA, 19 nt, artificial
  Oligomer
cccaaaccuagaaaucugg

SEQ ID NO: 9242 - RNA, 19 nt, artificial
  Oligomer
ugcccauaggugugcaaau

SEQ ID NO: 9243 - RNA, 19 nt, artificial
  Oligomer
gaggagggaagagaaaugg

SEQ ID NO: 9244 - RNA, 19 nt, artificial
  Oligomer
agccuugaaauucuuugag

SEQ ID NO: 9245 - RNA, 19 nt, artificial
  Oligomer
gacuuuacagguaagaugu

SEQ ID NO: 9246 - RNA, 19 nt, artificial
  Oligomer
aaguccguaaacaggccaa

SEQ ID NO: 9247 - RNA, 19 nt, artificial
  Oligomer
gaccuuucaguuacaaaca

SEQ ID NO: 9248 - RNA, 19 nt, artificial
  Oligomer
cucuugagugacagguuua

SEQ ID NO: 9249 - RNA, 19 nt, artificial
  Oligomer
cauaggugugcaaauccuu

SEQ ID NO: 9250 - RNA, 19 nt, artificial
  Oligomer
aaaguaagguaagagccuu

SEQ ID NO: 9251 - RNA, 19 nt, artificial
  Oligomer
agguguauuugugcggcag

SEQ ID NO: 9252 - RNA, 19 nt, artificial
  Oligomer
acagggaaauaagaaccag

SEQ ID NO: 9253 - RNA, 19 nt, artificial
  Oligomer
ccagauacugacagcacag

SEQ ID NO: 9254 - RNA, 19 nt, artificial
  Oligomer
guggcuauucacauuuggu

SEQ ID NO: 9255 - RNA, 19 nt, artificial
  Oligomer
gguuaaaugaaguccguaa

SEQ ID NO: 9256 - RNA, 19 nt, artificial
  Oligomer
aauacugauacagguacaa

SEQ ID NO: 9257 - RNA, 19 nt, artificial
  Oligomer
auacugauacagguacaaa

SEQ ID NO: 9258 - RNA, 19 nt, artificial
  Oligomer
ccaacagcagagcugaagu

SEQ ID NO: 9259 - RNA, 19 nt, artificial
  Oligomer
cccaucagugauucugcca

SEQ ID NO: 9260 - RNA, 19 nt, artificial
  Oligomer
gaaaauggguacguuuuug

SEQ ID NO: 9261 - RNA, 19 nt, artificial
  Oligomer
gaaauaagaaccaguucca

SEQ ID NO: 9262 - RNA, 19 nt, artificial
  Oligomer
aaauaagaaccaguuccau

SEQ ID NO: 9263 - RNA, 19 nt, artificial
  Oligomer
agagcauuucuuucuggca

SEQ ID NO: 9264 - RNA, 19 nt, artificial
  Oligomer
ggcacauuuuuuguuuggc

SEQ ID NO: 9265 - RNA, 19 nt, artificial
  Oligomer
gacccagauacugacagca

SEQ ID NO: 9266 - RNA, 19 nt, artificial
  Oligomer
aagacuuuacagguaagau

SEQ ID NO: 9267 - RNA, 19 nt, artificial
  Oligomer
cuuuugggcuaaacaaaua

SEQ ID NO: 9268 - RNA, 19 nt, artificial
  Oligomer
ggaguuuggagugucaagu

SEQ ID NO: 9269 - RNA, 19 nt, artificial
  Oligomer
gugucaaguucacauauac

SEQ ID NO: 9270 - RNA, 19 nt, artificial
  Oligomer
cuauuuaaaugccagcaaa

SEQ ID NO: 9271 - RNA, 19 nt, artificial
  Oligomer
cuggauucccaucagugau

SEQ ID NO: 9272 - RNA, 19 nt, artificial
  Oligomer
aacagggaaauaagaacca

SEQ ID NO: 9273 - RNA, 19 nt, artificial
  Oligomer
uacuuggaaaguugaggaa

SEQ ID NO: 9274 - RNA, 19 nt, artificial
  Oligomer
ccacauugggaguccuugu

SEQ ID NO: 9275 - RNA, 19 nt, artificial
  Oligomer
aguccucuugagugacagg

SEQ ID NO: 9276 - RNA, 19 nt, artificial
  Oligomer
gugacagguuuaggaaggg

SEQ ID NO: 9277 - RNA, 19 nt, artificial
  Oligomer
acaaacccuccacuuuaaa

SEQ ID NO: 9278 - RNA, 19 nt, artificial
  Oligomer
acuuuaaaaugcaagagga

SEQ ID NO: 9279 - RNA, 19 nt, artificial
  Oligomer
aggagggaagagaaaugga

SEQ ID NO: 9280 - RNA, 19 nt, artificial
  Oligomer
gagccuugaaauucuuuga

SEQ ID NO: 9281 - RNA, 19 nt, artificial
  Oligomer
uggguacguuuuugacauu

SEQ ID NO: 9282 - RNA, 19 nt, artificial
  Oligomer
cauuuuuuguuuggcacaa

SEQ ID NO: 9283 - RNA, 19 nt, artificial
  Oligomer
agguacaaacggcaaucca

SEQ ID NO: 9284 - RNA, 19 nt, artificial
  Oligomer
ccagcaaaaagcuggauuc

SEQ ID NO: 9285 - RNA, 19 nt, artificial
  Oligomer
gcaaaaagcuggauuccca

SEQ ID NO: 9286 - RNA, 19 nt, artificial
  Oligomer
ggugugcaaauccuuaugc

SEQ ID NO: 9287 - RNA, 19 nt, artificial
  Oligomer
gccuuacacuucauauuuc

SEQ ID NO: 9288 - RNA, 19 nt, artificial
  Oligomer
gaagcaagagcauuucuuu

SEQ ID NO: 9289 - RNA, 19 nt, artificial
  Oligomer
agcauuucuuucuggcaca

SEQ ID NO: 9290 - RNA, 19 nt, artificial
  Oligomer
aguccguaaacaggccaag

SEQ ID NO: 9291 - RNA, 19 nt, artificial
  Oligomer
guugugccagauuaaaaua

SEQ ID NO: 9292 - RNA, 19 nt, artificial
  Oligomer
aguaggagacuaaggaaaa

SEQ ID NO: 9293 - RNA, 19 nt, artificial
  Oligomer
ccacuuuaaaaugcaagag

SEQ ID NO: 9294 - RNA, 19 nt, artificial
  Oligomer
cauuuuugugaaaaugggu

SEQ ID NO: 9295 - RNA, 19 nt, artificial
  Oligomer
gaaaguugaggaagcaaga

SEQ ID NO: 9296 - RNA, 19 nt, artificial
  Oligomer
cauccuccgcccaaaaaau

SEQ ID NO: 9297 - RNA, 19 nt, artificial
  Oligomer
caccacauugggaguccuu

SEQ ID NO: 9298 - RNA, 19 nt, artificial
  Oligomer
cuagaaaucuggacuaaau

SEQ ID NO: 9299 - RNA, 19 nt, artificial
  Oligomer
gagugacagguuuaggaag

SEQ ID NO: 9300 - RNA, 19 nt, artificial
  Oligomer
caggaguuuggagugucaa

SEQ ID NO: 9301 - RNA, 19 nt, artificial
  Oligomer
caaacccuccacuuuaaaa

SEQ ID NO: 9302 - RNA, 19 nt, artificial
  Oligomer
ggcacaaucacaaguaaga

SEQ ID NO: 9303 - RNA, 19 nt, artificial
  Oligomer
aaguaagacuuuacaggua

SEQ ID NO: 9304 - RNA, 19 nt, artificial
  Oligomer
cauuugguuucuacuccag

SEQ ID NO: 9305 - RNA, 19 nt, artificial
  Oligomer
cagagcgauuacuuuuggg

SEQ ID NO: 9306 - RNA, 19 nt, artificial
  Oligomer
gcauccuccgcccaaaaaa

SEQ ID NO: 9307 - RNA, 19 nt, artificial
  Oligomer
ccucuugagugacagguuu

SEQ ID NO: 9308 - RNA, 19 nt, artificial
  Oligomer
aaacacaaacagggaaaua

SEQ ID NO: 9309 - RNA, 19 nt, artificial
  Oligomer
gcaagagcauuucuuucug

SEQ ID NO: 9310 - RNA, 19 nt, artificial
  Oligomer
gagcgauuacuuuugggcu

SEQ ID NO: 9311 - RNA, 19 nt, artificial
  Oligomer
gguacaaacggcaauccau

SEQ ID NO: 9312 - RNA, 19 nt, artificial
  Oligomer
ccgcuuuaaaaaugguaau

SEQ ID NO: 9313 - RNA, 19 nt, artificial
  Oligomer
caaaaagcuggauucccau

SEQ ID NO: 9314 - RNA, 19 nt, artificial
  Oligomer
cagugauucugccaucaaa

SEQ ID NO: 9315 - RNA, 19 nt, artificial
  Oligomer
gugauucugccaucaaacu

SEQ ID NO: 9316 - RNA, 19 nt, artificial
  Oligomer
agagacaaacccuccacuu

SEQ ID NO: 9317 - RNA, 19 nt, artificial
  Oligomer
aagaggcaagggaccaaaa

SEQ ID NO: 9318 - RNA, 19 nt, artificial
  Oligomer
cgagguuuuguaaggaaaa

SEQ ID NO: 9319 - RNA, 19 nt, artificial
  Oligomer
acaugacccuaucacaaaa

SEQ ID NO: 9320 - RNA, 19 nt, artificial
  Oligomer
gagugaucagaaacaagaa

SEQ ID NO: 9321 - RNA, 19 nt, artificial
  Oligomer
ggaagauuuacaagaugaa

SEQ ID NO: 9322 - RNA, 19 nt, artificial
  Oligomer
cguggacgagguuuuguaa

SEQ ID NO: 9323 - RNA, 19 nt, artificial
  Oligomer
cuggcacagugguuagaaa

SEQ ID NO: 9324 - RNA, 19 nt, artificial
  Oligomer
acccuaucacaaaaaacaa

SEQ ID NO: 9325 - RNA, 19 nt, artificial
  Oligomer
aguugagacuguuggugaa

SEQ ID NO: 9326 - RNA, 19 nt, artificial
  Oligomer
ccuuaguuuugaaacccaa

SEQ ID NO: 9327 - RNA, 19 nt, artificial
  Oligomer
gacuguuggugaaauugca

SEQ ID NO: 9328 - RNA, 19 nt, artificial
  Oligomer
ucagcagcuugacucaaaa

SEQ ID NO: 9329 - RNA, 19 nt, artificial
  Oligomer
cguuugugguggaaagaca

SEQ ID NO: 9330 - RNA, 19 nt, artificial
  Oligomer
cccuaucacaaaaaacaaa

SEQ ID NO: 9331 - RNA, 19 nt, artificial
  Oligomer
uggaggaauuggaacagaa

SEQ ID NO: 9332 - RNA, 19 nt, artificial
  Oligomer
gcaagagcugaauuauaau

SEQ ID NO: 9333 - RNA, 19 nt, artificial
  Oligomer
gacccuaucacaaaaaaca

SEQ ID NO: 9334 - RNA, 19 nt, artificial
  Oligomer
gcuugacaguaaagucaga

SEQ ID NO: 9335 - RNA, 19 nt, artificial
  Oligomer
agagcacagugauguuaga

SEQ ID NO: 9336 - RNA, 19 nt, artificial
  Oligomer
gcuuuucuuuggagaauaa

SEQ ID NO: 9337 - RNA, 19 nt, artificial
  Oligomer
gcuggaugaucaauauagu

SEQ ID NO: 9338 - RNA, 19 nt, artificial
  Oligomer
caguaaaaggauuuaggaa

SEQ ID NO: 9339 - RNA, 19 nt, artificial
  Oligomer
uaaggaaaagcaagcguaa

SEQ ID NO: 9340 - RNA, 19 nt, artificial
  Oligomer
gauguuagacaaacagaaa

SEQ ID NO: 9341 - RNA, 19 nt, artificial
  Oligomer
ugauguuagacaaacagaa

SEQ ID NO: 9342 - RNA, 19 nt, artificial
  Oligomer
cacagugauguuagacaaa

SEQ ID NO: 9343 - RNA, 19 nt, artificial
  Oligomer
cagcauaacauaaggaaaa

SEQ ID NO: 9344 - RNA, 19 nt, artificial
  Oligomer
ugacaauaagagaaaggaa

SEQ ID NO: 9345 - RNA, 19 nt, artificial
  Oligomer
cagagaacacgagaccaau

SEQ ID NO: 9346 - RNA, 19 nt, artificial
  Oligomer
caggaagacccaauccaga

SEQ ID NO: 9347 - RNA, 19 nt, artificial
  Oligomer
gcguaaucuucaggauaau

SEQ ID NO: 9348 - RNA, 19 nt, artificial
  Oligomer
acagcauaacauaaggaaa

SEQ ID NO: 9349 - RNA, 19 nt, artificial
  Oligomer
acgagguuuuguaaggaaa

SEQ ID NO: 9350 - RNA, 19 nt, artificial
  Oligomer
aaggauuuaggaaguucaa

SEQ ID NO: 9351 - RNA, 19 nt, artificial
  Oligomer
aaguauuacuccaggccaa

SEQ ID NO: 9352 - RNA, 19 nt, artificial
  Oligomer
cccagaaugcccugauuaa

SEQ ID NO: 9353 - RNA, 19 nt, artificial
  Oligomer
gagccuggaagauuuacaa

SEQ ID NO: 9354 - RNA, 19 nt, artificial
  Oligomer
gucugaaggaagaaaggaa

SEQ ID NO: 9355 - RNA, 19 nt, artificial
  Oligomer
acuucuugcuacagcauaa

SEQ ID NO: 9356 - RNA, 19 nt, artificial
  Oligomer
cgcugccaaugauguuuca

SEQ ID NO: 9357 - RNA, 19 nt, artificial
  Oligomer
gauugaaagcauccuagaa

SEQ ID NO: 9358 - RNA, 19 nt, artificial
  Oligomer
cgaacaugacccuaucaca

SEQ ID NO: 9359 - RNA, 19 nt, artificial
  Oligomer
ugcccugauuaaugaugaa

SEQ ID NO: 9360 - RNA, 19 nt, artificial
  Oligomer
uggcaaagagugaucagaa

SEQ ID NO: 9361 - RNA, 19 nt, artificial
  Oligomer
agaccaaugguguggcaaa

SEQ ID NO: 9362 - RNA, 19 nt, artificial
  Oligomer
ucugaaggaagaaaggaaa

SEQ ID NO: 9363 - RNA, 19 nt, artificial
  Oligomer
ccagcuuuaugaugacagu

SEQ ID NO: 9364 - RNA, 19 nt, artificial
  Oligomer
ugaacauguugggagagaa

SEQ ID NO: 9365 - RNA, 19 nt, artificial
  Oligomer
agcugaacauguugggaga

SEQ ID NO: 9366 - RNA, 19 nt, artificial
  Oligomer
gaaaaaugcuggcaccaga

SEQ ID NO: 9367 - RNA, 19 nt, artificial
  Oligomer
cgcacacaaaagugaugaa

SEQ ID NO: 9368 - RNA, 19 nt, artificial
  Oligomer
agaugugaaugagagaaau

SEQ ID NO: 9369 - RNA, 19 nt, artificial
  Oligomer
ggguccaguucacugugaa

SEQ ID NO: 9370 - RNA, 19 nt, artificial
  Oligomer
caucauucgcaauuacaaa

SEQ ID NO: 9371 - RNA, 19 nt, artificial
  Oligomer
ggauuuaggaaguucaaca

SEQ ID NO: 9372 - RNA, 19 nt, artificial
  Oligomer
gaggaauuggaacagaaau

SEQ ID NO: 9373 - RNA, 19 nt, artificial
  Oligomer
guaaagucagaaaugugaa

SEQ ID NO: 9374 - RNA, 19 nt, artificial
  Oligomer
ucaggauaauuuucaggaa

SEQ ID NO: 9375 - RNA, 19 nt, artificial
  Oligomer
gacgagguuuuguaaggaa

SEQ ID NO: 9376 - RNA, 19 nt, artificial
  Oligomer
aaaguuggaggaauuggaa

SEQ ID NO: 9377 - RNA, 19 nt, artificial
  Oligomer
guucggcagcagcuuaaaa

SEQ ID NO: 9378 - RNA, 19 nt, artificial
  Oligomer
guugcugaaugucacugaa

SEQ ID NO: 9379 - RNA, 19 nt, artificial
  Oligomer
agcuguuacucaagaagau

SEQ ID NO: 9380 - RNA, 19 nt, artificial
  Oligomer
cagugauguuagacaaaca

SEQ ID NO: 9381 - RNA, 19 nt, artificial
  Oligomer
gcuuuaugaugacaguuuu

SEQ ID NO: 9382 - RNA, 19 nt, artificial
  Oligomer
ucaugggcuucaucagcaa

SEQ ID NO: 9383 - RNA, 19 nt, artificial
  Oligomer
ggugcaucaugggcuucau

SEQ ID NO: 9384 - RNA, 19 nt, artificial
  Oligomer
aacaugacccuaucacaaa

SEQ ID NO: 9385 - RNA, 19 nt, artificial
  Oligomer
gaauuggaacagaaauaca

SEQ ID NO: 9386 - RNA, 19 nt, artificial
  Oligomer
gguucacuauaguugcgga

SEQ ID NO: 9387 - RNA, 19 nt, artificial
  Oligomer
gguuauguguauagagcau

SEQ ID NO: 9388 - RNA, 19 nt, artificial
  Oligomer
cuugcuacagcauaacaua

SEQ ID NO: 9389 - RNA, 19 nt, artificial
  Oligomer
cacagugguuagaaaagca

SEQ ID NO: 9390 - RNA, 19 nt, artificial
  Oligomer
ucggcaccugcaauugaaa

SEQ ID NO: 9391 - RNA, 19 nt, artificial
  Oligomer
aguucggcagcagcuuaaa

SEQ ID NO: 9392 - RNA, 19 nt, artificial
  Oligomer
cacugaacuuacccagaau

SEQ ID NO: 9393 - RNA, 19 nt, artificial
  Oligomer
ccaccauccguuuucauga

SEQ ID NO: 9394 - RNA, 19 nt, artificial
  Oligomer
gcucguuugugguggaaag

SEQ ID NO: 9395 - RNA, 19 nt, artificial
  Oligomer
caaugguguggcaaagagu

SEQ ID NO: 9396 - RNA, 19 nt, artificial
  Oligomer
auguguauagagcaugaaa

SEQ ID NO: 9397 - RNA, 19 nt, artificial
  Oligomer
gacaguuuucccauggaaa

SEQ ID NO: 9398 - RNA, 19 nt, artificial
  Oligomer
cugaaguaucuguauccaa

SEQ ID NO: 9399 - RNA, 19 nt, artificial
  Oligomer
ggacgagguuuuguaagga

SEQ ID NO: 9400 - RNA, 19 nt, artificial
  Oligomer
ccguuguggugaucuccaa

SEQ ID NO: 9401 - RNA, 19 nt, artificial
  Oligomer
ugugaaugagagaaauaca

SEQ ID NO: 9402 - RNA, 19 nt, artificial
  Oligomer
gcaccuucagucuuuucca

SEQ ID NO: 9403 - RNA, 19 nt, artificial
  Oligomer
ggagaauaacuucuugcua

SEQ ID NO: 9404 - RNA, 19 nt, artificial
  Oligomer
agugguuagaaaagcaaga

SEQ ID NO: 9405 - RNA, 19 nt, artificial
  Oligomer
uggcacagugguuagaaaa

SEQ ID NO: 9406 - RNA, 19 nt, artificial
  Oligomer
aaaggaacuggauauauca

SEQ ID NO: 9407 - RNA, 19 nt, artificial
  Oligomer
aagucauggcugcugagaa

SEQ ID NO: 9408 - RNA, 19 nt, artificial
  Oligomer
ggauugaaagcauccuaga

SEQ ID NO: 9409 - RNA, 19 nt, artificial
  Oligomer
gcagaacugguucacuaua

SEQ ID NO: 9410 - RNA, 19 nt, artificial
  Oligomer
gcuuggaucagcugcagaa

SEQ ID NO: 9411 - RNA, 19 nt, artificial
  Oligomer
aaggaaguaguucacaaaa

SEQ ID NO: 9412 - RNA, 19 nt, artificial
  Oligomer
aaaucaagagccuggaaga

SEQ ID NO: 9413 - RNA, 19 nt, artificial
  Oligomer
cgguugaacccuacacgaa

SEQ ID NO: 9414 - RNA, 19 nt, artificial
  Oligomer
ccuccauccuuugguacaa

SEQ ID NO: 9415 - RNA, 19 nt, artificial
  Oligomer
gagaaauacaguaaaagga

SEQ ID NO: 9416 - RNA, 19 nt, artificial
  Oligomer
ugaaauugcaagagcugaa

SEQ ID NO: 9417 - RNA, 19 nt, artificial
  Oligomer
cguucgcacucuguguaua

SEQ ID NO: 9418 - RNA, 19 nt, artificial
  Oligomer
cugaaggaagaaaggaaaa

SEQ ID NO: 9419 - RNA, 19 nt, artificial
  Oligomer
caagcguaaucuucaggau

SEQ ID NO: 9420 - RNA, 19 nt, artificial
  Oligomer
cccugacaucauucgcaau

SEQ ID NO: 9421 - RNA, 19 nt, artificial
  Oligomer
gaagcuucuugguccuaac

SEQ ID NO: 9422 - RNA, 19 nt, artificial
  Oligomer
ugcaauugaaagaacagaa

SEQ ID NO: 9423 - RNA, 19 nt, artificial
  Oligomer
aggaauuggaacagaaaua

SEQ ID NO: 9424 - RNA, 19 nt, artificial
  Oligomer
gcuuaaaaaguuggaggaa

SEQ ID NO: 9425 - RNA, 19 nt, artificial
  Oligomer
cugcagaacugguucacua

SEQ ID NO: 9426 - RNA, 19 nt, artificial
  Oligomer
cgcuuuucuuuggagaaua

SEQ ID NO: 9427 - RNA, 19 nt, artificial
  Oligomer
gucacagcuggaugaucaa

SEQ ID NO: 9428 - RNA, 19 nt, artificial
  Oligomer
aguauuacuccaggccaaa

SEQ ID NO: 9429 - RNA, 19 nt, artificial
  Oligomer
caaagaccaugccuuugga

SEQ ID NO: 9430 - RNA, 19 nt, artificial
  Oligomer
ugacuuccaugcgguugaa

SEQ ID NO: 9431 - RNA, 19 nt, artificial
  Oligomer
gcauccuagaacucauuaa

SEQ ID NO: 9432 - RNA, 19 nt, artificial
  Oligomer
gggagagaagcuucuuggu

SEQ ID NO: 9433 - RNA, 19 nt, artificial
  Oligomer
aaaaaugcuggcaccagaa

SEQ ID NO: 9434 - RNA, 19 nt, artificial
  Oligomer
ugaauuucggcaccugcaa

SEQ ID NO: 9435 - RNA, 19 nt, artificial
  Oligomer
gcacgcacacaaaagugau

SEQ ID NO: 9436 - RNA, 19 nt, artificial
  Oligomer
uaaagaugugaaugagaga

SEQ ID NO: 9437 - RNA, 19 nt, artificial
  Oligomer
acuguuggugaaauugcaa

SEQ ID NO: 9438 - RNA, 19 nt, artificial
  Oligomer
ccuucagucuuuuccagca

SEQ ID NO: 9439 - RNA, 19 nt, artificial
  Oligomer
caugacccuaucacaaaaa

SEQ ID NO: 9440 - RNA, 19 nt, artificial
  Oligomer
aaaaguuggaggaauugga

SEQ ID NO: 9441 - RNA, 19 nt, artificial
  Oligomer
ugcagaacagagaacacga

SEQ ID NO: 9442 - RNA, 19 nt, artificial
  Oligomer
caauauagucgcuuuucuu

SEQ ID NO: 9443 - RNA, 19 nt, artificial
  Oligomer
acaucauucgcaauuacaa

SEQ ID NO: 9444 - RNA, 19 nt, artificial
  Oligomer
gaugggcucagcuuucaga

SEQ ID NO: 9445 - RNA, 19 nt, artificial
  Oligomer
cauggaggaguccaccaau

SEQ ID NO: 9446 - RNA, 19 nt, artificial
  Oligomer
aaugcuugacaauaagaga

SEQ ID NO: 9447 - RNA, 19 nt, artificial
  Oligomer
acagagaacacgagaccaa

SEQ ID NO: 9448 - RNA, 19 nt, artificial
  Oligomer
cagaacagagaacacgaga

SEQ ID NO: 9449 - RNA, 19 nt, artificial
  Oligomer
aaugcaaaaccuugcagaa

SEQ ID NO: 9450 - RNA, 19 nt, artificial
  Oligomer
cauccucgagagcugucua

SEQ ID NO: 9451 - RNA, 19 nt, artificial
  Oligomer
cagcuggaugaucaauaua

SEQ ID NO: 9452 - RNA, 19 nt, artificial
  Oligomer
aacccuacacgaagaaaga

SEQ ID NO: 9453 - RNA, 19 nt, artificial
  Oligomer
ccguggacgagguuuugua

SEQ ID NO: 9454 - RNA, 19 nt, artificial
  Oligomer
ccaggaaucuguccuucuu

SEQ ID NO: 9455 - RNA, 19 nt, artificial
  Oligomer
gaaagaacagaaaaaugcu

SEQ ID NO: 9456 - RNA, 19 nt, artificial
  Oligomer
gcaccugcaauugaaagaa

SEQ ID NO: 9457 - RNA, 19 nt, artificial
  Oligomer
cguagcugcuccuuugguu

SEQ ID NO: 9458 - RNA, 19 nt, artificial
  Oligomer
acaguaaaaggauuuagga

SEQ ID NO: 9459 - RNA, 19 nt, artificial
  Oligomer
cugugaaguugagacuguu

SEQ ID NO: 9460 - RNA, 19 nt, artificial
  Oligomer
augacccuaucacaaaaaa

SEQ ID NO: 9461 - RNA, 19 nt, artificial
  Oligomer
aggaaguaguucacaaaau

SEQ ID NO: 9462 - RNA, 19 nt, artificial
  Oligomer
agagugaucagaaacaaga

SEQ ID NO: 9463 - RNA, 19 nt, artificial
  Oligomer
cagcugucugaaggaagaa

SEQ ID NO: 9464 - RNA, 19 nt, artificial
  Oligomer
cgcgcagaaaaguuucauu

SEQ ID NO: 9465 - RNA, 19 nt, artificial
  Oligomer
ucccugacaucauucgcaa

SEQ ID NO: 9466 - RNA, 19 nt, artificial
  Oligomer
gcuguuacuuucccugaca

SEQ ID NO: 9467 - RNA, 19 nt, artificial
  Oligomer
uucuggcuuuggauugaaa

SEQ ID NO: 9468 - RNA, 19 nt, artificial
  Oligomer
gagguuuuguaaggaaaau

SEQ ID NO: 9469 - RNA, 19 nt, artificial
  Oligomer
guuugguaauugaccucga

SEQ ID NO: 9470 - RNA, 19 nt, artificial
  Oligomer
cucucaucguuacugaaga

SEQ ID NO: 9471 - RNA, 19 nt, artificial
  Oligomer
accugcaauugaaagaaca

SEQ ID NO: 9472 - RNA, 19 nt, artificial
  Oligomer
aagugaugaacauggagga

SEQ ID NO: 9473 - RNA, 19 nt, artificial
  Oligomer
agagcucguuuguggugga

SEQ ID NO: 9474 - RNA, 19 nt, artificial
  Oligomer
ugaaaucaagagccuggaa

SEQ ID NO: 9475 - RNA, 19 nt, artificial
  Oligomer
aggauaauuuucaggaaga

SEQ ID NO: 9476 - RNA, 19 nt, artificial
  Oligomer
acagugguuagaaaagcaa

SEQ ID NO: 9477 - RNA, 19 nt, artificial
  Oligomer
cagagccaauggaacuuga

SEQ ID NO: 9478 - RNA, 19 nt, artificial
  Oligomer
aggcgaaccugacuuccau

SEQ ID NO: 9479 - RNA, 19 nt, artificial
  Oligomer
agaagcuucuugguccuaa

SEQ ID NO: 9480 - RNA, 19 nt, artificial
  Oligomer
acauggaggaguccaccaa

SEQ ID NO: 9481 - RNA, 19 nt, artificial
  Oligomer
aguaaagucagaaauguga

SEQ ID NO: 9482 - RNA, 19 nt, artificial
  Oligomer
cacagcuggaugaucaaua

SEQ ID NO: 9483 - RNA, 19 nt, artificial
  Oligomer
cagugguuagaaaagcaag

SEQ ID NO: 9484 - RNA, 19 nt, artificial
  Oligomer
aaggaacuggauauaucaa

SEQ ID NO: 9485 - RNA, 19 nt, artificial
  Oligomer
ccuaaaggaacuggauaua

SEQ ID NO: 9486 - RNA, 19 nt, artificial
  Oligomer
ggcccuaaaggaacuggau

SEQ ID NO: 9487 - RNA, 19 nt, artificial
  Oligomer
caaauauugacaaagacca

SEQ ID NO: 9488 - RNA, 19 nt, artificial
  Oligomer
cauggcugcugagaauauu

SEQ ID NO: 9489 - RNA, 19 nt, artificial
  Oligomer
ucaucagcaaggagcgaga

SEQ ID NO: 9490 - RNA, 19 nt, artificial
  Oligomer
ccuucuggcuuuggauuga

SEQ ID NO: 9491 - RNA, 19 nt, artificial
  Oligomer
gauuuaggaaguucaacau

SEQ ID NO: 9492 - RNA, 19 nt, artificial
  Oligomer
aaaggauuuaggaaguuca

SEQ ID NO: 9493 - RNA, 19 nt, artificial
  Oligomer
augaacuaguggaguggaa

SEQ ID NO: 9494 - RNA, 19 nt, artificial
  Oligomer
agagaaaggaaguaguuca

SEQ ID NO: 9495 - RNA, 19 nt, artificial
  Oligomer
caauaagagaaaggaagua

SEQ ID NO: 9496 - RNA, 19 nt, artificial
  Oligomer
ugcuugacaauaagagaaa

SEQ ID NO: 9497 - RNA, 19 nt, artificial
  Oligomer
gaacagcuguuacucaaga

SEQ ID NO: 9498 - RNA, 19 nt, artificial
  Oligomer
ucgagagcugucuagguua

SEQ ID NO: 9499 - RNA, 19 nt, artificial
  Oligomer
agcugucugaaggaagaaa

SEQ ID NO: 9500 - RNA, 19 nt, artificial
  Oligomer
gcacgcugccaaugauguu

SEQ ID NO: 9501 - RNA, 19 nt, artificial
  Oligomer
aaggaagcaccagagccaa

SEQ ID NO: 9502 - RNA, 19 nt, artificial
  Oligomer
acaaagucauggcugcuga

SEQ ID NO: 9503 - RNA, 19 nt, artificial
  Oligomer
ggcuuuggauugaaagcau

SEQ ID NO: 9504 - RNA, 19 nt, artificial
  Oligomer
cucagugguacgaacuuca

SEQ ID NO: 9505 - RNA, 19 nt, artificial
  Oligomer
cccuuaguuuugaaaccca

SEQ ID NO: 9506 - RNA, 19 nt, artificial
  Oligomer
ggaugucucagugguacga

SEQ ID NO: 9507 - RNA, 19 nt, artificial
  Oligomer
cacucccuuaguuuugaaa

SEQ ID NO: 9508 - RNA, 19 nt, artificial
  Oligomer
gaauuucggcaccugcaau

SEQ ID NO: 9509 - RNA, 19 nt, artificial
  Oligomer
caaguguuaugggaccgca

SEQ ID NO: 9510 - RNA, 19 nt, artificial
  Oligomer
gcugaaugucacugaacuu

SEQ ID NO: 9511 - RNA, 19 nt, artificial
  Oligomer
agguuauguguauagagca

SEQ ID NO: 9512 - RNA, 19 nt, artificial
  Oligomer
acagcugucugaaggaaga

SEQ ID NO: 9513 - RNA, 19 nt, artificial
  Oligomer
aaagcaagcguaaucuuca

SEQ ID NO: 9514 - RNA, 19 nt, artificial
  Oligomer
cuugauggcccuaaaggaa

SEQ ID NO: 9515 - RNA, 19 nt, artificial
  Oligomer
cugacaucauucgcaauua

SEQ ID NO: 9516 - RNA, 19 nt, artificial
  Oligomer
agaacuuucugcuguuacu

SEQ ID NO: 9517 - RNA, 19 nt, artificial
  Oligomer
cgaaugaggguccucucau

SEQ ID NO: 9518 - RNA, 19 nt, artificial
  Oligomer
uucggcaccugcaauugaa

SEQ ID NO: 9519 - RNA, 19 nt, artificial
  Oligomer
aagaugugaaugagagaaa

SEQ ID NO: 9520 - RNA, 19 nt, artificial
  Oligomer
gaaugcccugauuaaugau

SEQ ID NO: 9521 - RNA, 19 nt, artificial
  Oligomer
ucgcacucuguguauauaa

SEQ ID NO: 9522 - RNA, 19 nt, artificial
  Oligomer
uauagagcaugaaaucaag

SEQ ID NO: 9523 - RNA, 19 nt, artificial
  Oligomer
uguguauagagcaugaaau

SEQ ID NO: 9524 - RNA, 19 nt, artificial
  Oligomer
uuauguguauagagcauga

SEQ ID NO: 9525 - RNA, 19 nt, artificial
  Oligomer
gguucaccagcuuuaugau

SEQ ID NO: 9526 - RNA, 19 nt, artificial
  Oligomer
gcagguucaccagcuuuau

SEQ ID NO: 9527 - RNA, 19 nt, artificial
  Oligomer
ccaugccuuuggaaaguau

SEQ ID NO: 9528 - RNA, 19 nt, artificial
  Oligomer
ugagaauauuccugagaau

SEQ ID NO: 9529 - RNA, 19 nt, artificial
  Oligomer
gcugcuccuuugguugaau

SEQ ID NO: 9530 - RNA, 19 nt, artificial
  Oligomer
uguuggugaaauugcaaga

SEQ ID NO: 9531 - RNA, 19 nt, artificial
  Oligomer
gagcucguuugugguggaa

SEQ ID NO: 9532 - RNA, 19 nt, artificial
  Oligomer
guugauuucugugucugaa

SEQ ID NO: 9533 - RNA, 19 nt, artificial
  Oligomer
caugccuuuggaaaguauu

SEQ ID NO: 9534 - RNA, 19 nt, artificial
  Oligomer
gaaguaucuguauccaaau

SEQ ID NO: 9535 - RNA, 19 nt, artificial
  Oligomer
ccugaaguaucuguaucca

SEQ ID NO: 9536 - RNA, 19 nt, artificial
  Oligomer
ggcugcugagaauauuccu

SEQ ID NO: 9537 - RNA, 19 nt, artificial
  Oligomer
gaaagaacuuucugcuguu

SEQ ID NO: 9538 - RNA, 19 nt, artificial
  Oligomer
cagcagcuugacucaaaau

SEQ ID NO: 9539 - RNA, 19 nt, artificial
  Oligomer
cuucuggcuuuggauugaa

SEQ ID NO: 9540 - RNA, 19 nt, artificial
  Oligomer
gaacauguugggagagaag

SEQ ID NO: 9541 - RNA, 19 nt, artificial
  Oligomer
aaagaggucucaaugugga

SEQ ID NO: 9542 - RNA, 19 nt, artificial
  Oligomer
guuuucuucugucaccaaa

SEQ ID NO: 9543 - RNA, 19 nt, artificial
  Oligomer
cugaguuggcaguuuucuu

SEQ ID NO: 9544 - RNA, 19 nt, artificial
  Oligomer
agcugcuccuuugguugaa

SEQ ID NO: 9545 - RNA, 19 nt, artificial
  Oligomer
aaguucggcagcagcuuaa

SEQ ID NO: 9546 - RNA, 19 nt, artificial
  Oligomer
ccagaaugcccugauuaau

SEQ ID NO: 9547 - RNA, 19 nt, artificial
  Oligomer
gcuugacaauaagagaaag

SEQ ID NO: 9548 - RNA, 19 nt, artificial
  Oligomer
caagguuauguguauagag

SEQ ID NO: 9549 - RNA, 19 nt, artificial
  Oligomer
acaagguuauguguauaga

SEQ ID NO: 9550 - RNA, 19 nt, artificial
  Oligomer
augugaaggacaagguuau

SEQ ID NO: 9551 - RNA, 19 nt, artificial
  Oligomer
cagaaagagcuugacagua

SEQ ID NO: 9552 - RNA, 19 nt, artificial
  Oligomer
agucgcuuuucuuuggaga

SEQ ID NO: 9553 - RNA, 19 nt, artificial
  Oligomer
ugacaguuuucccauggaa

SEQ ID NO: 9554 - RNA, 19 nt, artificial
  Oligomer
aguugauuucugugucuga

SEQ ID NO: 9555 - RNA, 19 nt, artificial
  Oligomer
acuugauggcccuaaagga

SEQ ID NO: 9556 - RNA, 19 nt, artificial
  Oligomer
caaagucauggcugcugag

SEQ ID NO: 9557 - RNA, 19 nt, artificial
  Oligomer
gacaucauucgcaauuaca

SEQ ID NO: 9558 - RNA, 19 nt, artificial
  Oligomer
ucaccaaaagaggucucaa

SEQ ID NO: 9559 - RNA, 19 nt, artificial
  Oligomer
augggcucagcuuucagaa

SEQ ID NO: 9560 - RNA, 19 nt, artificial
  Oligomer
agccugguuugguaauuga

SEQ ID NO: 9561 - RNA, 19 nt, artificial
  Oligomer
gcuucacucccuuaguuuu

SEQ ID NO: 9562 - RNA, 19 nt, artificial
  Oligomer
gaggguccucucaucguua

SEQ ID NO: 9563 - RNA, 19 nt, artificial
  Oligomer
uuuugggcacgcacacaaa

SEQ ID NO: 9564 - RNA, 19 nt, artificial
  Oligomer
gaaauugcaagagcugaau

SEQ ID NO: 9565 - RNA, 19 nt, artificial
  Oligomer
guuugugguggaaagacag

SEQ ID NO: 9566 - RNA, 19 nt, artificial
  Oligomer
ugacccuaucacaaaaaac

SEQ ID NO: 9567 - RNA, 19 nt, artificial
  Oligomer
cgcacucuguguauauaac

SEQ ID NO: 9568 - RNA, 19 nt, artificial
  Oligomer
aacagcuguuacucaagaa

SEQ ID NO: 9569 - RNA, 19 nt, artificial
  Oligomer
guggcaaagagugaucaga

SEQ ID NO: 9570 - RNA, 19 nt, artificial
  Oligomer
gggaauauucagagcacag

SEQ ID NO: 9571 - RNA, 19 nt, artificial
  Oligomer
cuguaugccauccucgaga

SEQ ID NO: 9572 - RNA, 19 nt, artificial
  Oligomer
aagcguaaucuucaggaua

SEQ ID NO: 9573 - RNA, 19 nt, artificial
  Oligomer
ccuacacgaagaaagaacu

SEQ ID NO: 9574 - RNA, 19 nt, artificial
  Oligomer
gguugaacccuacacgaag

SEQ ID NO: 9575 - RNA, 19 nt, artificial
  Oligomer
aaagcauccuagaacucau

SEQ ID NO: 9576 - RNA, 19 nt, artificial
  Oligomer
cauuuugggcacgcacaca

SEQ ID NO: 9577 - RNA, 19 nt, artificial
  Oligomer
aguucacugugaaguugag

SEQ ID NO: 9578 - RNA, 19 nt, artificial
  Oligomer
gguccaguucacugugaag

SEQ ID NO: 9579 - RNA, 19 nt, artificial
  Oligomer
agcucguuugugguggaaa

SEQ ID NO: 9580 - RNA, 19 nt, artificial
  Oligomer
ccuugcagaacagagaaca

SEQ ID NO: 9581 - RNA, 19 nt, artificial
  Oligomer
gguuaacguucgcacucug

SEQ ID NO: 9582 - RNA, 19 nt, artificial
  Oligomer
gccuggaagauuuacaaga

SEQ ID NO: 9583 - RNA, 19 nt, artificial
  Oligomer
cuagguuaacguucgcacu

SEQ ID NO: 9584 - RNA, 19 nt, artificial
  Oligomer
aaaugugaaggacaagguu

SEQ ID NO: 9585 - RNA, 19 nt, artificial
  Oligomer
gugauguuagacaaacaga

SEQ ID NO: 9586 - RNA, 19 nt, artificial
  Oligomer
gcaagcguaaucuucagga

SEQ ID NO: 9587 - RNA, 19 nt, artificial
  Oligomer
ugaucaauauagucgcuuu

SEQ ID NO: 9588 - RNA, 19 nt, artificial
  Oligomer
cuguuacuuucccugacau

SEQ ID NO: 9589 - RNA, 19 nt, artificial
  Oligomer
agugguacgaacuucagca

SEQ ID NO: 9590 - RNA, 19 nt, artificial
  Oligomer
ucacucccuuaguuuugaa

SEQ ID NO: 9591 - RNA, 19 nt, artificial
  Oligomer
ugaagagcuucacucccuu

SEQ ID NO: 9592 - RNA, 19 nt, artificial
  Oligomer
ugcuggcaccagaacgaau

SEQ ID NO: 9593 - RNA, 19 nt, artificial
  Oligomer
uugcaagagcugaauuaua

SEQ ID NO: 9594 - RNA, 19 nt, artificial
  Oligomer
acagaaauacaccuacgaa

SEQ ID NO: 9595 - RNA, 19 nt, artificial
  Oligomer
cuuaaaaaguuggaggaau

SEQ ID NO: 9596 - RNA, 19 nt, artificial
  Oligomer
aagaacagcuguuacucaa

SEQ ID NO: 9597 - RNA, 19 nt, artificial
  Oligomer
aaccuugcagaacagagaa

SEQ ID NO: 9598 - RNA, 19 nt, artificial
  Oligomer
uguuagacaaacagaaaga

SEQ ID NO: 9599 - RNA, 19 nt, artificial
  Oligomer
aaaacgcccagagauuuaa

SEQ ID NO: 9600 - RNA, 19 nt, artificial
  Oligomer
ggaaaauucuggaaaacgc

SEQ ID NO: 9601 - RNA, 19 nt, artificial
  Oligomer
gacccaauccagaugucua

SEQ ID NO: 9602 - RNA, 19 nt, artificial
  Oligomer
gaaaagcaagcguaaucuu

SEQ ID NO: 9603 - RNA, 19 nt, artificial
  Oligomer
aggaagcaccagagccaau

SEQ ID NO: 9604 - RNA, 19 nt, artificial
  Oligomer
augccuuuggaaaguauua

SEQ ID NO: 9605 - RNA, 19 nt, artificial
  Oligomer
gggccaucacauucacaug

SEQ ID NO: 9606 - RNA, 19 nt, artificial
  Oligomer
ugggcuucaucagcaagga

SEQ ID NO: 9607 - RNA, 19 nt, artificial
  Oligomer
caccaaaagaggucucaau

SEQ ID NO: 9608 - RNA, 19 nt, artificial
  Oligomer
gaugucucagugguacgaa

SEQ ID NO: 9609 - RNA, 19 nt, artificial
  Oligomer
guccucucaucguuacuga

SEQ ID NO: 9610 - RNA, 19 nt, artificial
  Oligomer
cagucuggcggcugaauuu

SEQ ID NO: 9611 - RNA, 19 nt, artificial
  Oligomer
aguuggaggaauuggaaca

SEQ ID NO: 9612 - RNA, 19 nt, artificial
  Oligomer
gcagaacagagaacacgag

SEQ ID NO: 9613 - RNA, 19 nt, artificial
  Oligomer
ggauaauuuucaggaagac

SEQ ID NO: 9614 - RNA, 19 nt, artificial
  Oligomer
agaauaacuucuugcuaca

SEQ ID NO: 9615 - RNA, 19 nt, artificial
  Oligomer
cagaaaaguuucauuugcu

SEQ ID NO: 9616 - RNA, 19 nt, artificial
  Oligomer
ggcacagugguuagaaaag

SEQ ID NO: 9617 - RNA, 19 nt, artificial
  Oligomer
cuuccugacuccaccaugu

SEQ ID NO: 9618 - RNA, 19 nt, artificial
  Oligomer
aagguggcaggaugucuca

SEQ ID NO: 9619 - RNA, 19 nt, artificial
  Oligomer
guaaaaggauuuaggaagu

SEQ ID NO: 9620 - RNA, 19 nt, artificial
  Oligomer
guugagacuguuggugaaa

SEQ ID NO: 9621 - RNA, 19 nt, artificial
  Oligomer
ugaaguugagacuguuggu

SEQ ID NO: 9622 - RNA, 19 nt, artificial
  Oligomer
acaaacaaguguuauggga

SEQ ID NO: 9623 - RNA, 19 nt, artificial
  Oligomer
ggagagucugcagcaaguu

SEQ ID NO: 9624 - RNA, 19 nt, artificial
  Oligomer
cacuauaguugcggagagu

SEQ ID NO: 9625 - RNA, 19 nt, artificial
  Oligomer
gcccaaugcuugcuuggau

SEQ ID NO: 9626 - RNA, 19 nt, artificial
  Oligomer
acuucaaaugcaaaaccuu

SEQ ID NO: 9627 - RNA, 19 nt, artificial
  Oligomer
aaacgcccagagauuuaau

SEQ ID NO: 9628 - RNA, 19 nt, artificial
  Oligomer
caaaauuccuggagcaggu

SEQ ID NO: 9629 - RNA, 19 nt, artificial
  Oligomer
ggaccagcugaacauguug

SEQ ID NO: 9630 - RNA, 19 nt, artificial
  Oligomer
caauguggaccagcugaac

SEQ ID NO: 9631 - RNA, 19 nt, artificial
  Oligomer
cuuaguuuugaaacccaau

SEQ ID NO: 9632 - RNA, 19 nt, artificial
  Oligomer
cagaaauacaccuacgaac

SEQ ID NO: 9633 - RNA, 19 nt, artificial
  Oligomer
cccugauuaaugaugaacu

SEQ ID NO: 9634 - RNA, 19 nt, artificial
  Oligomer
aguugcugaaugucacuga

SEQ ID NO: 9635 - RNA, 19 nt, artificial
  Oligomer
ugguguggcaaagagugau

SEQ ID NO: 9636 - RNA, 19 nt, artificial
  Oligomer
gucagaaaugugaaggaca

SEQ ID NO: 9637 - RNA, 19 nt, artificial
  Oligomer
aagucagaaaugugaagga

SEQ ID NO: 9638 - RNA, 19 nt, artificial
  Oligomer
ggaauauucagagcacagu

SEQ ID NO: 9639 - RNA, 19 nt, artificial
  Oligomer
ucuggaaaacgcccagaga

SEQ ID NO: 9640 - RNA, 19 nt, artificial
  Oligomer
uccagaugucuaugaucau

SEQ ID NO: 9641 - RNA, 19 nt, artificial
  Oligomer
ugcuguaugccauccucga

SEQ ID NO: 9642 - RNA, 19 nt, artificial
  Oligomer
gcuacagcauaacauaagg

SEQ ID NO: 9643 - RNA, 19 nt, artificial
  Oligomer
gaucaauauagucgcuuuu

SEQ ID NO: 9644 - RNA, 19 nt, artificial
  Oligomer
ccguuuucaugaccuccug

SEQ ID NO: 9645 - RNA, 19 nt, artificial
  Oligomer
agcaccagagccaauggaa

SEQ ID NO: 9646 - RNA, 19 nt, artificial
  Oligomer
acccuacacgaagaaagaa

SEQ ID NO: 9647 - RNA, 19 nt, artificial
  Oligomer
ugaacccuacacgaagaaa

SEQ ID NO: 9648 - RNA, 19 nt, artificial
  Oligomer
gcaucaugggcuucaucag

SEQ ID NO: 9649 - RNA, 19 nt, artificial
  Oligomer
ugccagccugguuugguaa

SEQ ID NO: 9650 - RNA, 19 nt, artificial
  Oligomer
uccucucaucguuacugaa

SEQ ID NO: 9651 - RNA, 19 nt, artificial
  Oligomer
cacacaaaagugaugaaca

SEQ ID NO: 9652 - RNA, 19 nt, artificial
  Oligomer
ggaaguucaacauuuuggg

SEQ ID NO: 9653 - RNA, 19 nt, artificial
  Oligomer
aauacaccuacgaacauga

SEQ ID NO: 9654 - RNA, 19 nt, artificial
  Oligomer
agcuuaaaaaguuggagga

SEQ ID NO: 9655 - RNA, 19 nt, artificial
  Oligomer
gaugaacuaguggagugga

SEQ ID NO: 9656 - RNA, 19 nt, artificial
  Oligomer
gacaauaagagaaaggaag

SEQ ID NO: 9657 - RNA, 19 nt, artificial
  Oligomer
guucgcacucuguguauau

SEQ ID NO: 9658 - RNA, 19 nt, artificial
  Oligomer
cagcuguuacucaagaaga

SEQ ID NO: 9659 - RNA, 19 nt, artificial
  Oligomer
caagaacagcuguuacuca

SEQ ID NO: 9660 - RNA, 19 nt, artificial
  Oligomer
gagaccaaugguguggcaa

SEQ ID NO: 9661 - RNA, 19 nt, artificial
  Oligomer
caaaaccuugcagaacaga

SEQ ID NO: 9662 - RNA, 19 nt, artificial
  Oligomer
acagaaagagcuugacagu

SEQ ID NO: 9663 - RNA, 19 nt, artificial
  Oligomer
agagauuuaaucaggcuca

SEQ ID NO: 9664 - RNA, 19 nt, artificial
  Oligomer
auaaggaaaagcaagcgua

SEQ ID NO: 9665 - RNA, 19 nt, artificial
  Oligomer
cauaacauaaggaaaagca

SEQ ID NO: 9666 - RNA, 19 nt, artificial
  Oligomer
uacagcauaacauaaggaa

SEQ ID NO: 9667 - RNA, 19 nt, artificial
  Oligomer
gcgcagaaaaguuucauuu

SEQ ID NO: 9668 - RNA, 19 nt, artificial
  Oligomer
gcgcgcagaaaaguuucau

SEQ ID NO: 9669 - RNA, 19 nt, artificial
  Oligomer
gccuuuggaaaguauuacu

SEQ ID NO: 9670 - RNA, 19 nt, artificial
  Oligomer
ucauggcugcugagaauau

SEQ ID NO: 9671 - RNA, 19 nt, artificial
  Oligomer
uggaccagcugaacauguu

SEQ ID NO: 9672 - RNA, 19 nt, artificial
  Oligomer
ggcucagcuuucagaagug

SEQ ID NO: 9673 - RNA, 19 nt, artificial
  Oligomer
ugaucuccaacgucagcca

SEQ ID NO: 9674 - RNA, 19 nt, artificial
  Oligomer
ggguccucucaucguuacu

SEQ ID NO: 9675 - RNA, 19 nt, artificial
  Oligomer
ggcacgcacacaaaaguga

SEQ ID NO: 9676 - RNA, 19 nt, artificial
  Oligomer
cucguuugugguggaaaga

SEQ ID NO: 9677 - RNA, 19 nt, artificial
  Oligomer
cggcagcagcuuaaaaagu

SEQ ID NO: 9678 - RNA, 19 nt, artificial
  Oligomer
caguaaagucagaaaugug

SEQ ID NO: 9679 - RNA, 19 nt, artificial
  Oligomer
caggauaauuuucaggaag

SEQ ID NO: 9680 - RNA, 19 nt, artificial
  Oligomer
aaggaaaagcaagcguaau

SEQ ID NO: 9681 - RNA, 19 nt, artificial
  Oligomer
cguuuucaugaccuccugu

SEQ ID NO: 9682 - RNA, 19 nt, artificial
  Oligomer
cauuugccaccauccguuu

SEQ ID NO: 9683 - RNA, 19 nt, artificial
  Oligomer
ccuggcacagugguuagaa

SEQ ID NO: 9684 - RNA, 19 nt, artificial
  Oligomer
gcugagaauauuccugaga

SEQ ID NO: 9685 - RNA, 19 nt, artificial
  Oligomer
cugcugagaauauuccuga

SEQ ID NO: 9686 - RNA, 19 nt, artificial
  Oligomer
uuugggcacgcacacaaaa

SEQ ID NO: 9687 - RNA, 19 nt, artificial
  Oligomer
gugaaauugcaagagcuga

SEQ ID NO: 9688 - RNA, 19 nt, artificial
  Oligomer
uuaugggaccgcaccuuca

SEQ ID NO: 9689 - RNA, 19 nt, artificial
  Oligomer
uucggcagcagcuuaaaaa

SEQ ID NO: 9690 - RNA, 19 nt, artificial
  Oligomer
cuugcuuggaucagcugca

SEQ ID NO: 9691 - RNA, 19 nt, artificial
  Oligomer
aagagugaucagaaacaag

SEQ ID NO: 9692 - RNA, 19 nt, artificial
  Oligomer
aaaccuugcagaacagaga

SEQ ID NO: 9693 - RNA, 19 nt, artificial
  Oligomer
ggguaguuucgcuuuccug

SEQ ID NO: 9694 - RNA, 19 nt, artificial
  Oligomer
aaugugaaggacaagguua

SEQ ID NO: 9695 - RNA, 19 nt, artificial
  Oligomer
agcacagugauguuagaca

SEQ ID NO: 9696 - RNA, 19 nt, artificial
  Oligomer
ccagagauuuaaucaggcu

SEQ ID NO: 9697 - RNA, 19 nt, artificial
  Oligomer
ucuucaggauaauuuucag

SEQ ID NO: 9698 - RNA, 19 nt, artificial
  Oligomer
cguaaucuucaggauaauu

SEQ ID NO: 9699 - RNA, 19 nt, artificial
  Oligomer
gauauaucaagacugaguu

SEQ ID NO: 9700 - RNA, 19 nt, artificial
  Oligomer
cugacuuccaugcgguuga

SEQ ID NO: 9701 - RNA, 19 nt, artificial
  Oligomer
ccaucacauucacaugggu

SEQ ID NO: 9702 - RNA, 19 nt, artificial
  Oligomer
agagaagcuucuugguccu

SEQ ID NO: 9703 - RNA, 19 nt, artificial
  Oligomer
acauguugggagagaagcu

SEQ ID NO: 9704 - RNA, 19 nt, artificial
  Oligomer
aaucuguccuucuuccuga

SEQ ID NO: 9705 - RNA, 19 nt, artificial
  Oligomer
gaagagcuucacucccuua

SEQ ID NO: 9706 - RNA, 19 nt, artificial
  Oligomer
cuggcaccagaacgaauga

SEQ ID NO: 9707 - RNA, 19 nt, artificial
  Oligomer
cugaauuucggcaccugca

SEQ ID NO: 9708 - RNA, 19 nt, artificial
  Oligomer
ugaugaacauggaggaguc

SEQ ID NO: 9709 - RNA, 19 nt, artificial
  Oligomer
ugggcacgcacacaaaagu

SEQ ID NO: 9710 - RNA, 19 nt, artificial
  Oligomer
aauugcaagagcugaauua

SEQ ID NO: 9711 - RNA, 19 nt, artificial
  Oligomer
gucuuuuccagcagcucau

SEQ ID NO: 9712 - RNA, 19 nt, artificial
  Oligomer
agcagcuuaaaaaguugga

SEQ ID NO: 9713 - RNA, 19 nt, artificial
  Oligomer
gaacugguucacuauaguu

SEQ ID NO: 9714 - RNA, 19 nt, artificial
  Oligomer
agaguugcugaaugucacu

SEQ ID NO: 9715 - RNA, 19 nt, artificial
  Oligomer
uagaguugcugaaugucac

SEQ ID NO: 9716 - RNA, 19 nt, artificial
  Oligomer
gaaacaagaacagcuguua

SEQ ID NO: 9717 - RNA, 19 nt, artificial
  Oligomer
aaacagaaagagcuugaca

SEQ ID NO: 9718 - RNA, 19 nt, artificial
  Oligomer
gagauuuaaucaggcucag

SEQ ID NO: 9719 - RNA, 19 nt, artificial
  Oligomer
cgcccagagauuuaaucag

SEQ ID NO: 9720 - RNA, 19 nt, artificial
  Oligomer
cuggaaaacgcccagagau

SEQ ID NO: 9721 - RNA, 19 nt, artificial
  Oligomer
ggaagaaaggaaaauucug

SEQ ID NO: 9722 - RNA, 19 nt, artificial
  Oligomer
gaaggaagaaaggaaaauu

SEQ ID NO: 9723 - RNA, 19 nt, artificial
  Oligomer
ggaaaagcaagcguaaucu

SEQ ID NO: 9724 - RNA, 19 nt, artificial
  Oligomer
ggaugaucaauauagucgc

SEQ ID NO: 9725 - RNA, 19 nt, artificial
  Oligomer
ugcugagaauauuccugag

SEQ ID NO: 9726 - RNA, 19 nt, artificial
  Oligomer
cugcuguuacuuucccuga

SEQ ID NO: 9727 - RNA, 19 nt, artificial
  Oligomer
caugcgguugaacccuaca

SEQ ID NO: 9728 - RNA, 19 nt, artificial
  Oligomer
auguggaccagcugaacau

SEQ ID NO: 9729 - RNA, 19 nt, artificial
  Oligomer
gccuccauccuuugguaca

SEQ ID NO: 9730 - RNA, 19 nt, artificial
  Oligomer
acacaaaagugaugaacau

SEQ ID NO: 9731 - RNA, 19 nt, artificial
  Oligomer
gagagaaauacaguaaaag

SEQ ID NO: 9732 - RNA, 19 nt, artificial
  Oligomer
gcagcagcuuaaaaaguug

SEQ ID NO: 9733 - RNA, 19 nt, artificial
  Oligomer
cuauaguugcggagagucu

SEQ ID NO: 9734 - RNA, 19 nt, artificial
  Oligomer
uguguauauaaccucgaca

SEQ ID NO: 9735 - RNA, 19 nt, artificial
  Oligomer
cuguguauauaaccucgac

SEQ ID NO: 9736 - RNA, 19 nt, artificial
  Oligomer
auaagagaaaggaaguagu

SEQ ID NO: 9737 - RNA, 19 nt, artificial
  Oligomer
acaauaagagaaaggaagu

SEQ ID NO: 9738 - RNA, 19 nt, artificial
  Oligomer
augcuugacaauaagagaa

SEQ ID NO: 9739 - RNA, 19 nt, artificial
  Oligomer
ugaucagaaacaagaacag

SEQ ID NO: 9740 - RNA, 19 nt, artificial
  Oligomer
agaacacgagaccaauggu

SEQ ID NO: 9741 - RNA, 19 nt, artificial
  Oligomer
gcaaaaccuugcagaacag

SEQ ID NO: 9742 - RNA, 19 nt, artificial
  Oligomer
aaaugcaaaaccuugcaga

SEQ ID NO: 9743 - RNA, 19 nt, artificial
  Oligomer
caagaugaauaugacuuca

SEQ ID NO: 9744 - RNA, 19 nt, artificial
  Oligomer
cugucugaaggaagaaagg

SEQ ID NO: 9745 - RNA, 19 nt, artificial
  Oligomer
gcugucugaaggaagaaag

SEQ ID NO: 9746 - RNA, 19 nt, artificial
  Oligomer
aagcaagcguaaucuucag

SEQ ID NO: 9747 - RNA, 19 nt, artificial
  Oligomer
gucgcuuuucuuuggagaa

SEQ ID NO: 9748 - RNA, 19 nt, artificial
  Oligomer
acaguuuucccauggaaau

SEQ ID NO: 9749 - RNA, 19 nt, artificial
  Oligomer
gaacccuacacgaagaaag

SEQ ID NO: 9750 - RNA, 19 nt, artificial
  Oligomer
uggaaugaugggugcauca

SEQ ID NO: 9751 - RNA, 19 nt, artificial
  Oligomer
ucaauguggaccagcugaa

SEQ ID NO: 9752 - RNA, 19 nt, artificial
  Oligomer
aguuuucuucugucaccaa

SEQ ID NO: 9753 - RNA, 19 nt, artificial
  Oligomer
ccauccuuugguacaacau

SEQ ID NO: 9754 - RNA, 19 nt, artificial
  Oligomer
gaaugaggguccucucauc

SEQ ID NO: 9755 - RNA, 19 nt, artificial
  Oligomer
aaugcuggcaccagaacga

SEQ ID NO: 9756 - RNA, 19 nt, artificial
  Oligomer
gugaaugagagaaauacag

SEQ ID NO: 9757 - RNA, 19 nt, artificial
  Oligomer
aaguugagacuguugguga

SEQ ID NO: 9758 - RNA, 19 nt, artificial
  Oligomer
gacagucuuggcaccuaac

SEQ ID NO: 9759 - RNA, 19 nt, artificial
  Oligomer
agaacugguucacuauagu

SEQ ID NO: 9760 - RNA, 19 nt, artificial
  Oligomer
cacucuguguauauaaccu

SEQ ID NO: 9761 - RNA, 19 nt, artificial
  Oligomer
agaaaggaaguaguucaca

SEQ ID NO: 9762 - RNA, 19 nt, artificial
  Oligomer
gagaaaggaaguaguucac

SEQ ID NO: 9763 - RNA, 19 nt, artificial
  Oligomer
augguguggcaaagaguga

SEQ ID NO: 9764 - RNA, 19 nt, artificial
  Oligomer
gacuucaaaugcaaaaccu

SEQ ID NO: 9765 - RNA, 19 nt, artificial
  Oligomer
agagccuggaagauuuaca

SEQ ID NO: 9766 - RNA, 19 nt, artificial
  Oligomer
auagagcaugaaaucaaga

SEQ ID NO: 9767 - RNA, 19 nt, artificial
  Oligomer
cggguaguuucgcuuuccu

SEQ ID NO: 9768 - RNA, 19 nt, artificial
  Oligomer
gcccuaaaggaacuggaua

SEQ ID NO: 9769 - RNA, 19 nt, artificial
  Oligomer
agcagguucaccagcuuua

SEQ ID NO: 9770 - RNA, 19 nt, artificial
  Oligomer
uacuuucccugacaucauu

SEQ ID NO: 9771 - RNA, 19 nt, artificial
  Oligomer
gcagcuugacucaaaauuc

SEQ ID NO: 9772 - RNA, 19 nt, artificial
  Oligomer
uguugggagagaagcuucu

SEQ ID NO: 9773 - RNA, 19 nt, artificial
  Oligomer
cagaagugcugaguuggca

SEQ ID NO: 9774 - RNA, 19 nt, artificial
  Oligomer
cuucuuccugacuccacca

SEQ ID NO: 9775 - RNA, 19 nt, artificial
  Oligomer
guggugaucuccaacguca

SEQ ID NO: 9776 - RNA, 19 nt, artificial
  Oligomer
acgaaugaggguccucuca

SEQ ID NO: 9777 - RNA, 19 nt, artificial
  Oligomer
ugauaaagaugugaaugag

SEQ ID NO: 9778 - RNA, 19 nt, artificial
  Oligomer
uggugaaauugcaagagcu

SEQ ID NO: 9779 - RNA, 19 nt, artificial
  Oligomer
ugcagaacugguucacuau

SEQ ID NO: 9780 - RNA, 19 nt, artificial
  Oligomer
augcccugauuaaugauga

SEQ ID NO: 9781 - RNA, 19 nt, artificial
  Oligomer
gugaucagaaacaagaaca

SEQ ID NO: 9782 - RNA, 19 nt, artificial
  Oligomer
guguggcaaagagugauca

SEQ ID NO: 9783 - RNA, 19 nt, artificial
  Oligomer
gagcuugacaguaaaguca

SEQ ID NO: 9784 - RNA, 19 nt, artificial
  Oligomer
cagagcacagugauguuag

SEQ ID NO: 9785 - RNA, 19 nt, artificial
  Oligomer
gaauauucagagcacagug

SEQ ID NO: 9786 - RNA, 19 nt, artificial
  Oligomer
cuacagcauaacauaagga

SEQ ID NO: 9787 - RNA, 19 nt, artificial
  Oligomer
uagaaaagcaagacuggga

SEQ ID NO: 9788 - RNA, 19 nt, artificial
  Oligomer
cgcagaaaaguuucauuug

SEQ ID NO: 9789 - RNA, 19 nt, artificial
  Oligomer
cuaaaggaacuggauauau

SEQ ID NO: 9790 - RNA, 19 nt, artificial
  Oligomer
agagccaauggaacuugau

SEQ ID NO: 9791 - RNA, 19 nt, artificial
  Oligomer
ugacaaagaccaugccuuu

SEQ ID NO: 9792 - RNA, 19 nt, artificial
  Oligomer
guuacuuucccugacauca

SEQ ID NO: 9793 - RNA, 19 nt, artificial
  Oligomer
acgaugggcucagcuuuca

SEQ ID NO: 9794 - RNA, 19 nt, artificial
  Oligomer
ggcaccugcaauugaaaga

SEQ ID NO: 9795 - RNA, 19 nt, artificial
  Oligomer
caacauuuugggcacgcac

SEQ ID NO: 9796 - RNA, 19 nt, artificial
  Oligomer
ugaaugagagaaauacagu

SEQ ID NO: 9797 - RNA, 19 nt, artificial
  Oligomer
aaagaugugaaugagagaa

SEQ ID NO: 9798 - RNA, 19 nt, artificial
  Oligomer
caguucacugugaaguuga

SEQ ID NO: 9799 - RNA, 19 nt, artificial
  Oligomer
aaguguuaugggaccgcac

SEQ ID NO: 9800 - RNA, 19 nt, artificial
  Oligomer
uacccagaaugcccugauu

SEQ ID NO: 9801 - RNA, 19 nt, artificial
  Oligomer
cugaaugucacugaacuua

SEQ ID NO: 9802 - RNA, 19 nt, artificial
  Oligomer
ugcaaaaccuugcagaaca

SEQ ID NO: 9803 - RNA, 19 nt, artificial
  Oligomer
uauguguauagagcaugaa

SEQ ID NO: 9804 - RNA, 19 nt, artificial
  Oligomer
agcugucuagguuaacguu

SEQ ID NO: 9805 - RNA, 19 nt, artificial
  Oligomer
gaugaucaauauagucgcu

SEQ ID NO: 9806 - RNA, 19 nt, artificial
  Oligomer
aaaguauuacuccaggcca

SEQ ID NO: 9807 - RNA, 19 nt, artificial
  Oligomer
augggugcaucaugggcuu

SEQ ID NO: 9808 - RNA, 19 nt, artificial
  Oligomer
gucucagugguacgaacuu

SEQ ID NO: 9809 - RNA, 19 nt, artificial
  Oligomer
caauugugccagccugguu

SEQ ID NO: 9810 - RNA, 19 nt, artificial
  Oligomer
augcuggcaccagaacgaa

SEQ ID NO: 9811 - RNA, 19 nt, artificial
  Oligomer
cggcaccugcaauugaaag

SEQ ID NO: 9812 - RNA, 19 nt, artificial
  Oligomer
ggugaaauugcaagagcug

SEQ ID NO: 9813 - RNA, 19 nt, artificial
  Oligomer
aacagaaauacaccuacga

SEQ ID NO: 9814 - RNA, 19 nt, artificial
  Oligomer
acagcagagcgccuguauu

SEQ ID NO: 9815 - RNA, 19 nt, artificial
  Oligomer
ugcugaaugucacugaacu

SEQ ID NO: 9816 - RNA, 19 nt, artificial
  Oligomer
cuugcagaacagagaacac

SEQ ID NO: 9817 - RNA, 19 nt, artificial
  Oligomer
agaaaggaaaauucuggaa

SEQ ID NO: 9818 - RNA, 19 nt, artificial
  Oligomer
uuuuccuuacaaaaccucg

SEQ ID NO: 9819 - RNA, 19 nt, artificial
  Oligomer
uuuugugauagggucaugu

SEQ ID NO: 9820 - RNA, 19 nt, artificial
  Oligomer
uucuuguuucugaucacuc

SEQ ID NO: 9821 - RNA, 19 nt, artificial
  Oligomer
uucaucuuguaaaucuucc

SEQ ID NO: 9822 - RNA, 19 nt, artificial
  Oligomer
uuacaaaaccucguccacg

SEQ ID NO: 9823 - RNA, 19 nt, artificial
  Oligomer
uuucuaaccacugugccag

SEQ ID NO: 9824 - RNA, 19 nt, artificial
  Oligomer
uuguuuuuugugauagggu

SEQ ID NO: 9825 - RNA, 19 nt, artificial
  Oligomer
uucaccaacagucucaacu

SEQ ID NO: 9826 - RNA, 19 nt, artificial
  Oligomer
uuggguuucaaaacuaagg

SEQ ID NO: 9827 - RNA, 19 nt, artificial
  Oligomer
ugcaauuucaccaacaguc

SEQ ID NO: 9828 - RNA, 19 nt, artificial
  Oligomer
uuuugagucaagcugcuga

SEQ ID NO: 9829 - RNA, 19 nt, artificial
  Oligomer
ugucuuuccaccacaaacg

SEQ ID NO: 9830 - RNA, 19 nt, artificial
  Oligomer
uuuguuuuuugugauaggg

SEQ ID NO: 9831 - RNA, 19 nt, artificial
  Oligomer
uucuguuccaauuccucca

SEQ ID NO: 9832 - RNA, 19 nt, artificial
  Oligomer
auuauaauucagcucuugc

SEQ ID NO: 9833 - RNA, 19 nt, artificial
  Oligomer
uguuuuuugugauaggguc

SEQ ID NO: 9834 - RNA, 19 nt, artificial
  Oligomer
ucugacuuuacugucaagc

SEQ ID NO: 9835 - RNA, 19 nt, artificial
  Oligomer
ucuaacaucacugugcucu

SEQ ID NO: 9836 - RNA, 19 nt, artificial
  Oligomer
uuauucuccaaagaaaagc

SEQ ID NO: 9837 - RNA, 19 nt, artificial
  Oligomer
acuauauugaucauccagc

SEQ ID NO: 9838 - RNA, 19 nt, artificial
  Oligomer
uuccuaaauccuuuuacug

SEQ ID NO: 9839 - RNA, 19 nt, artificial
  Oligomer
uuacgcuugcuuuuccuua

SEQ ID NO: 9840 - RNA, 19 nt, artificial
  Oligomer
uuucuguuugucuaacauc

SEQ ID NO: 9841 - RNA, 19 nt, artificial
  Oligomer
uucuguuugucuaacauca

SEQ ID NO: 9842 - RNA, 19 nt, artificial
  Oligomer
uuugucuaacaucacugug

SEQ ID NO: 9843 - RNA, 19 nt, artificial
  Oligomer
uuuuccuuauguuaugcug

SEQ ID NO: 9844 - RNA, 19 nt, artificial
  Oligomer
uuccuuucucuuauuguca

SEQ ID NO: 9845 - RNA, 19 nt, artificial
  Oligomer
auuggucucguguucucug

SEQ ID NO: 9846 - RNA, 19 nt, artificial
  Oligomer
ucuggauugggucuuccug

SEQ ID NO: 9847 - RNA, 19 nt, artificial
  Oligomer
auuauccugaagauuacgc

SEQ ID NO: 9848 - RNA, 19 nt, artificial
  Oligomer
uuuccuuauguuaugcugu

SEQ ID NO: 9849 - RNA, 19 nt, artificial
  Oligomer
uuuccuuacaaaaccucgu

SEQ ID NO: 9850 - RNA, 19 nt, artificial
  Oligomer
uugaacuuccuaaauccuu

SEQ ID NO: 9851 - RNA, 19 nt, artificial
  Oligomer
uuggccuggaguaauacuu

SEQ ID NO: 9852 - RNA, 19 nt, artificial
  Oligomer
uuaaucagggcauucuggg

SEQ ID NO: 9853 - RNA, 19 nt, artificial
  Oligomer
uuguaaaucuuccaggcuc

SEQ ID NO: 9854 - RNA, 19 nt, artificial
  Oligomer
uuccuuucuuccuucagac

SEQ ID NO: 9855 - RNA, 19 nt, artificial
  Oligomer
uuaugcuguagcaagaagu

SEQ ID NO: 9856 - RNA, 19 nt, artificial
  Oligomer
ugaaacaucauuggcagcg

SEQ ID NO: 9857 - RNA, 19 nt, artificial
  Oligomer
uucuaggaugcuuucaauc

SEQ ID NO: 9858 - RNA, 19 nt, artificial
  Oligomer
ugugauagggucauguucg

SEQ ID NO: 9859 - RNA, 19 nt, artificial
  Oligomer
uucaucauuaaucagggca

SEQ ID NO: 9860 - RNA, 19 nt, artificial
  Oligomer
uucugaucacucuuugcca

SEQ ID NO: 9861 - RNA, 19 nt, artificial
  Oligomer
uuugccacaccauuggucu

SEQ ID NO: 9862 - RNA, 19 nt, artificial
  Oligomer
uuuccuuucuuccuucaga

SEQ ID NO: 9863 - RNA, 19 nt, artificial
  Oligomer
acugucaucauaaagcugg

SEQ ID NO: 9864 - RNA, 19 nt, artificial
  Oligomer
uucucucccaacauguuca

SEQ ID NO: 9865 - RNA, 19 nt, artificial
  Oligomer
ucucccaacauguucagcu

SEQ ID NO: 9866 - RNA, 19 nt, artificial
  Oligomer
ucuggugccagcauuuuuc

SEQ ID NO: 9867 - RNA, 19 nt, artificial
  Oligomer
uucaucacuuuugugugcg

SEQ ID NO: 9868 - RNA, 19 nt, artificial
  Oligomer
auuucucucauucacaucu

SEQ ID NO: 9869 - RNA, 19 nt, artificial
  Oligomer
uucacagugaacuggaccc

SEQ ID NO: 9870 - RNA, 19 nt, artificial
  Oligomer
uuuguaauugcgaaugaug

SEQ ID NO: 9871 - RNA, 19 nt, artificial
  Oligomer
uguugaacuuccuaaaucc

SEQ ID NO: 9872 - RNA, 19 nt, artificial
  Oligomer
auuucuguuccaauuccuc

SEQ ID NO: 9873 - RNA, 19 nt, artificial
  Oligomer
uucacauuucugacuuuac

SEQ ID NO: 9874 - RNA, 19 nt, artificial
  Oligomer
uuccugaaaauuauccuga

SEQ ID NO: 9875 - RNA, 19 nt, artificial
  Oligomer
uuccuuacaaaaccucguc

SEQ ID NO: 9876 - RNA, 19 nt, artificial
  Oligomer
uuccaauuccuccaacuuu

SEQ ID NO: 9877 - RNA, 19 nt, artificial
  Oligomer
uuuuaagcugcugccgaac

SEQ ID NO: 9878 - RNA, 19 nt, artificial
  Oligomer
uucagugacauucagcaac

SEQ ID NO: 9879 - RNA, 19 nt, artificial
  Oligomer
aucuucuugaguaacagcu

SEQ ID NO: 9880 - RNA, 19 nt, artificial
  Oligomer
uguuugucuaacaucacug

SEQ ID NO: 9881 - RNA, 19 nt, artificial
  Oligomer
aaaacugucaucauaaagc

SEQ ID NO: 9882 - RNA, 19 nt, artificial
  Oligomer
uugcugaugaagcccauga

SEQ ID NO: 9883 - RNA, 19 nt, artificial
  Oligomer
augaagcccaugaugcacc

SEQ ID NO: 9884 - RNA, 19 nt, artificial
  Oligomer
uuugugauagggucauguu

SEQ ID NO: 9885 - RNA, 19 nt, artificial
  Oligomer
uguauuucuguuccaauuc

SEQ ID NO: 9886 - RNA, 19 nt, artificial
  Oligomer
uccgcaacuauagugaacc

SEQ ID NO: 9887 - RNA, 19 nt, artificial
  Oligomer
augcucuauacacauaacc

SEQ ID NO: 9888 - RNA, 19 nt, artificial
  Oligomer
uauguuaugcuguagcaag

SEQ ID NO: 9889 - RNA, 19 nt, artificial
  Oligomer
ugcuuuucuaaccacugug

SEQ ID NO: 9890 - RNA, 19 nt, artificial
  Oligomer
uuucaauugcaggugccga

SEQ ID NO: 9891 - RNA, 19 nt, artificial
  Oligomer
uuuaagcugcugccgaacu

SEQ ID NO: 9892 - RNA, 19 nt, artificial
  Oligomer
auucuggguaaguucagug

SEQ ID NO: 9893 - RNA, 19 nt, artificial
  Oligomer
ucaugaaaacggauggugg

SEQ ID NO: 9894 - RNA, 19 nt, artificial
  Oligomer
cuuuccaccacaaacgagc

SEQ ID NO: 9895 - RNA, 19 nt, artificial
  Oligomer
acucuuugccacaccauug

SEQ ID NO: 9896 - RNA, 19 nt, artificial
  Oligomer
uuucaugcucuauacacau

SEQ ID NO: 9897 - RNA, 19 nt, artificial
  Oligomer
uuuccaugggaaaacuguc

SEQ ID NO: 9898 - RNA, 19 nt, artificial
  Oligomer
uuggauacagauacuucag

SEQ ID NO: 9899 - RNA, 19 nt, artificial
  Oligomer
uccuuacaaaaccucgucc

SEQ ID NO: 9900 - RNA, 19 nt, artificial
  Oligomer
uuggagaucaccacaacgg

SEQ ID NO: 9901 - RNA, 19 nt, artificial
  Oligomer
uguauuucucucauucaca

SEQ ID NO: 9902 - RNA, 19 nt, artificial
  Oligomer
uggaaaagacugaaggugc

SEQ ID NO: 9903 - RNA, 19 nt, artificial
  Oligomer
uagcaagaaguuauucucc

SEQ ID NO: 9904 - RNA, 19 nt, artificial
  Oligomer
ucuugcuuuucuaaccacu

SEQ ID NO: 9905 - RNA, 19 nt, artificial
  Oligomer
uuuucuaaccacugugcca

SEQ ID NO: 9906 - RNA, 19 nt, artificial
  Oligomer
ugauauauccaguuccuuu

SEQ ID NO: 9907 - RNA, 19 nt, artificial
  Oligomer
uucucagcagccaugacuu

SEQ ID NO: 9908 - RNA, 19 nt, artificial
  Oligomer
ucuaggaugcuuucaaucc

SEQ ID NO: 9909 - RNA, 19 nt, artificial
  Oligomer
uauagugaaccaguucugc

SEQ ID NO: 9910 - RNA, 19 nt, artificial
  Oligomer
uucugcagcugauccaagc

SEQ ID NO: 9911 - RNA, 19 nt, artificial
  Oligomer
uuuugugaacuacuuccuu

SEQ ID NO: 9912 - RNA, 19 nt, artificial
  Oligomer
ucuuccaggcucuugauuu

SEQ ID NO: 9913 - RNA, 19 nt, artificial
  Oligomer
uucguguaggguucaaccg

SEQ ID NO: 9914 - RNA, 19 nt, artificial
  Oligomer
uuguaccaaaggauggagg

SEQ ID NO: 9915 - RNA, 19 nt, artificial
  Oligomer
uccuuuuacuguauuucuc

SEQ ID NO: 9916 - RNA, 19 nt, artificial
  Oligomer
uucagcucuugcaauuuca

SEQ ID NO: 9917 - RNA, 19 nt, artificial
  Oligomer
uauacacagagugcgaacg

SEQ ID NO: 9918 - RNA, 19 nt, artificial
  Oligomer
uuuuccuuucuuccuucag

SEQ ID NO: 9919 - RNA, 19 nt, artificial
  Oligomer
auccugaagauuacgcuug

SEQ ID NO: 9920 - RNA, 19 nt, artificial
  Oligomer
auugcgaaugaugucaggg

SEQ ID NO: 9921 - RNA, 19 nt, artificial
  Oligomer
guuaggaccaagaagcuuc

SEQ ID NO: 9922 - RNA, 19 nt, artificial
  Oligomer
uucuguucuuucaauugca

SEQ ID NO: 9923 - RNA, 19 nt, artificial
  Oligomer
uauuucuguuccaauuccu

SEQ ID NO: 9924 - RNA, 19 nt, artificial
  Oligomer
uuccuccaacuuuuuaagc

SEQ ID NO: 9925 - RNA, 19 nt, artificial
  Oligomer
uagugaaccaguucugcag

SEQ ID NO: 9926 - RNA, 19 nt, artificial
  Oligomer
uauucuccaaagaaaagcg

SEQ ID NO: 9927 - RNA, 19 nt, artificial
  Oligomer
uugaucauccagcugugac

SEQ ID NO: 9928 - RNA, 19 nt, artificial
  Oligomer
uuuggccuggaguaauacu

SEQ ID NO: 9929 - RNA, 19 nt, artificial
  Oligomer
uccaaaggcauggucuuug

SEQ ID NO: 9930 - RNA, 19 nt, artificial
  Oligomer
uucaaccgcauggaaguca

SEQ ID NO: 9931 - RNA, 19 nt, artificial
  Oligomer
uuaaugaguucuaggaugc

SEQ ID NO: 9932 - RNA, 19 nt, artificial
  Oligomer
accaagaagcuucucuccc

SEQ ID NO: 9933 - RNA, 19 nt, artificial
  Oligomer
uucuggugccagcauuuuu

SEQ ID NO: 9934 - RNA, 19 nt, artificial
  Oligomer
uugcaggugccgaaauuca

SEQ ID NO: 9935 - RNA, 19 nt, artificial
  Oligomer
aucacuuuugugugcgugc

SEQ ID NO: 9936 - RNA, 19 nt, artificial
  Oligomer
ucucucauucacaucuuua

SEQ ID NO: 9937 - RNA, 19 nt, artificial
  Oligomer
uugcaauuucaccaacagu

SEQ ID NO: 9938 - RNA, 19 nt, artificial
  Oligomer
ugcuggaaaagacugaagg

SEQ ID NO: 9939 - RNA, 19 nt, artificial
  Oligomer
uuuuugugauagggucaug

SEQ ID NO: 9940 - RNA, 19 nt, artificial
  Oligomer
uccaauuccuccaacuuuu

SEQ ID NO: 9941 - RNA, 19 nt, artificial
  Oligomer
ucguguucucuguucugca

SEQ ID NO: 9942 - RNA, 19 nt, artificial
  Oligomer
aagaaaagcgacuauauug

SEQ ID NO: 9943 - RNA, 19 nt, artificial
  Oligomer
uuguaauugcgaaugaugu

SEQ ID NO: 9944 - RNA, 19 nt, artificial
  Oligomer
ucugaaagcugagcccauc

SEQ ID NO: 9945 - RNA, 19 nt, artificial
  Oligomer
auugguggacuccuccaug

SEQ ID NO: 9946 - RNA, 19 nt, artificial
  Oligomer
ucucuuauugucaagcauu

SEQ ID NO: 9947 - RNA, 19 nt, artificial
  Oligomer
uuggucucguguucucugu

SEQ ID NO: 9948 - RNA, 19 nt, artificial
  Oligomer
ucucguguucucuguucug

SEQ ID NO: 9949 - RNA, 19 nt, artificial
  Oligomer
uucugcaagguuuugcauu

SEQ ID NO: 9950 - RNA, 19 nt, artificial
  Oligomer
uagacagcucucgaggaug

SEQ ID NO: 9951 - RNA, 19 nt, artificial
  Oligomer
uauauugaucauccagcug

SEQ ID NO: 9952 - RNA, 19 nt, artificial
  Oligomer
ucuuucuucguguaggguu

SEQ ID NO: 9953 - RNA, 19 nt, artificial
  Oligomer
uacaaaaccucguccacgg

SEQ ID NO: 9954 - RNA, 19 nt, artificial
  Oligomer
aagaaggacagauuccugg

SEQ ID NO: 9955 - RNA, 19 nt, artificial
  Oligomer
agcauuuuucuguucuuuc

SEQ ID NO: 9956 - RNA, 19 nt, artificial
  Oligomer
uucuuucaauugcaggugc

SEQ ID NO: 9957 - RNA, 19 nt, artificial
  Oligomer
aaccaaaggagcagcuacg

SEQ ID NO: 9958 - RNA, 19 nt, artificial
  Oligomer
uccuaaauccuuuuacugu

SEQ ID NO: 9959 - RNA, 19 nt, artificial
  Oligomer
aacagucucaacuucacag

SEQ ID NO: 9960 - RNA, 19 nt, artificial
  Oligomer
uuuuuugugauagggucau

SEQ ID NO: 9961 - RNA, 19 nt, artificial
  Oligomer
auuuugugaacuacuuccu

SEQ ID NO: 9962 - RNA, 19 nt, artificial
  Oligomer
ucuuguuucugaucacucu

SEQ ID NO: 9963 - RNA, 19 nt, artificial
  Oligomer
uucuuccuucagacagcug

SEQ ID NO: 9964 - RNA, 19 nt, artificial
  Oligomer
aaugaaacuuuucugcgcg

SEQ ID NO: 9965 - RNA, 19 nt, artificial
  Oligomer
uugcgaaugaugucaggga

SEQ ID NO: 9966 - RNA, 19 nt, artificial
  Oligomer
ugucagggaaaguaacagc

SEQ ID NO: 9967 - RNA, 19 nt, artificial
  Oligomer
uuucaauccaaagccagaa

SEQ ID NO: 9968 - RNA, 19 nt, artificial
  Oligomer
auuuuccuuacaaaaccuc

SEQ ID NO: 9969 - RNA, 19 nt, artificial
  Oligomer
ucgaggucaauuaccaaac

SEQ ID NO: 9970 - RNA, 19 nt, artificial
  Oligomer
ucuucaguaacgaugagag

SEQ ID NO: 9971 - RNA, 19 nt, artificial
  Oligomer
uguucuuucaauugcaggu

SEQ ID NO: 9972 - RNA, 19 nt, artificial
  Oligomer
uccuccauguucaucacuu

SEQ ID NO: 9973 - RNA, 19 nt, artificial
  Oligomer
uccaccacaaacgagcucu

SEQ ID NO: 9974 - RNA, 19 nt, artificial
  Oligomer
uuccaggcucuugauuuca

SEQ ID NO: 9975 - RNA, 19 nt, artificial
  Oligomer
ucuuccugaaaauuauccu

SEQ ID NO: 9976 - RNA, 19 nt, artificial
  Oligomer
uugcuuuucuaaccacugu

SEQ ID NO: 9977 - RNA, 19 nt, artificial
  Oligomer
ucaaguuccauuggcucug

SEQ ID NO: 9978 - RNA, 19 nt, artificial
  Oligomer
auggaagucagguucgccu

SEQ ID NO: 9979 - RNA, 19 nt, artificial
  Oligomer
uuaggaccaagaagcuucu

SEQ ID NO: 9980 - RNA, 19 nt, artificial
  Oligomer
uugguggacuccuccaugu

SEQ ID NO: 9981 - RNA, 19 nt, artificial
  Oligomer
ucacauuucugacuuuacu

SEQ ID NO: 9982 - RNA, 19 nt, artificial
  Oligomer
uauugaucauccagcugug

SEQ ID NO: 9983 - RNA, 19 nt, artificial
  Oligomer
cuugcuuuucuaaccacug

SEQ ID NO: 9984 - RNA, 19 nt, artificial
  Oligomer
uugauauauccaguuccuu

SEQ ID NO: 9985 - RNA, 19 nt, artificial
  Oligomer
uauauccaguuccuuuagg

SEQ ID NO: 9986 - RNA, 19 nt, artificial
  Oligomer
auccaguuccuuuagggcc

SEQ ID NO: 9987 - RNA, 19 nt, artificial
  Oligomer
uggucuuugucaauauuug

SEQ ID NO: 9988 - RNA, 19 nt, artificial
  Oligomer
aauauucucagcagccaug

SEQ ID NO: 9989 - RNA, 19 nt, artificial
  Oligomer
ucucgcuccuugcugauga

SEQ ID NO: 9990 - RNA, 19 nt, artificial
  Oligomer
ucaauccaaagccagaagg

SEQ ID NO: 9991 - RNA, 19 nt, artificial
  Oligomer
auguugaacuuccuaaauc

SEQ ID NO: 9992 - RNA, 19 nt, artificial
  Oligomer
ugaacuuccuaaauccuuu

SEQ ID NO: 9993 - RNA, 19 nt, artificial
  Oligomer
uuccacuccacuaguucau

SEQ ID NO: 9994 - RNA, 19 nt, artificial
  Oligomer
ugaacuacuuccuuucucu

SEQ ID NO: 9995 - RNA, 19 nt, artificial
  Oligomer
uacuuccuuucucuuauug

SEQ ID NO: 9996 - RNA, 19 nt, artificial
  Oligomer
uuucucuuauugucaagca

SEQ ID NO: 9997 - RNA, 19 nt, artificial
  Oligomer
ucuugaguaacagcuguuc

SEQ ID NO: 9998 - RNA, 19 nt, artificial
  Oligomer
uaaccuagacagcucucga

SEQ ID NO: 9999 - RNA, 19 nt, artificial
  Oligomer
uuucuuccuucagacagcu

SEQ ID NO: 10000 - RNA, 19 nt, artificial
  Oligomer
aacaucauuggcagcgugc

SEQ ID NO: 10001 - RNA, 19 nt, artificial
  Oligomer
uuggcucuggugcuuccuu

SEQ ID NO: 10002 - RNA, 19 nt, artificial
  Oligomer
ucagcagccaugacuuugu

SEQ ID NO: 10003 - RNA, 19 nt, artificial
  Oligomer
augcuuucaauccaaagcc

SEQ ID NO: 10004 - RNA, 19 nt, artificial
  Oligomer
ugaaguucguaccacugag

SEQ ID NO: 10005 - RNA, 19 nt, artificial
  Oligomer
uggguuucaaaacuaaggg

SEQ ID NO: 10006 - RNA, 19 nt, artificial
  Oligomer
ucguaccacugagacaucc

SEQ ID NO: 10007 - RNA, 19 nt, artificial
  Oligomer
uuucaaaacuaagggagug

SEQ ID NO: 10008 - RNA, 19 nt, artificial
  Oligomer
auugcaggugccgaaauuc

SEQ ID NO: 10009 - RNA, 19 nt, artificial
  Oligomer
ugcggucccauaacacuug

SEQ ID NO: 10010 - RNA, 19 nt, artificial
  Oligomer
aaguucagugacauucagc

SEQ ID NO: 10011 - RNA, 19 nt, artificial
  Oligomer
ugcucuauacacauaaccu

SEQ ID NO: 10012 - RNA, 19 nt, artificial
  Oligomer
ucuuccuucagacagcugu

SEQ ID NO: 10013 - RNA, 19 nt, artificial
  Oligomer
ugaagauuacgcuugcuuu

SEQ ID NO: 10014 - RNA, 19 nt, artificial
  Oligomer
uuccuuuagggccaucaag

SEQ ID NO: 10015 - RNA, 19 nt, artificial
  Oligomer
uaauugcgaaugaugucag

SEQ ID NO: 10016 - RNA, 19 nt, artificial
  Oligomer
aguaacagcagaaaguucu

SEQ ID NO: 10017 - RNA, 19 nt, artificial
  Oligomer
augagaggacccucauucg

SEQ ID NO: 10018 - RNA, 19 nt, artificial
  Oligomer
uucaauugcaggugccgaa

SEQ ID NO: 10019 - RNA, 19 nt, artificial
  Oligomer
uuucucucauucacaucuu

SEQ ID NO: 10020 - RNA, 19 nt, artificial
  Oligomer
aucauuaaucagggcauuc

SEQ ID NO: 10021 - RNA, 19 nt, artificial
  Oligomer
uuauauacacagagugcga

SEQ ID NO: 10022 - RNA, 19 nt, artificial
  Oligomer
cuugauuucaugcucuaua

SEQ ID NO: 10023 - RNA, 19 nt, artificial
  Oligomer
auuucaugcucuauacaca

SEQ ID NO: 10024 - RNA, 19 nt, artificial
  Oligomer
ucaugcucuauacacauaa

SEQ ID NO: 10025 - RNA, 19 nt, artificial
  Oligomer
aucauaaagcuggugaacc

SEQ ID NO: 10026 - RNA, 19 nt, artificial
  Oligomer
auaaagcuggugaaccugc

SEQ ID NO: 10027 - RNA, 19 nt, artificial
  Oligomer
auacuuuccaaaggcaugg

SEQ ID NO: 10028 - RNA, 19 nt, artificial
  Oligomer
auucucaggaauauucuca

SEQ ID NO: 10029 - RNA, 19 nt, artificial
  Oligomer
auucaaccaaaggagcagc

SEQ ID NO: 10030 - RNA, 19 nt, artificial
  Oligomer
ucuugcaauuucaccaaca

SEQ ID NO: 10031 - RNA, 19 nt, artificial
  Oligomer
uuccaccacaaacgagcuc

SEQ ID NO: 10032 - RNA, 19 nt, artificial
  Oligomer
uucagacacagaaaucaac

SEQ ID NO: 10033 - RNA, 19 nt, artificial
  Oligomer
aauacuuuccaaaggcaug

SEQ ID NO: 10034 - RNA, 19 nt, artificial
  Oligomer
auuuggauacagauacuuc

SEQ ID NO: 10035 - RNA, 19 nt, artificial
  Oligomer
uggauacagauacuucagg

SEQ ID NO: 10036 - RNA, 19 nt, artificial
  Oligomer
aggaauauucucagcagcc

SEQ ID NO: 10037 - RNA, 19 nt, artificial
  Oligomer
aacagcagaaaguucuuuc

SEQ ID NO: 10038 - RNA, 19 nt, artificial
  Oligomer
auuuugagucaagcugcug

SEQ ID NO: 10039 - RNA, 19 nt, artificial
  Oligomer
uucaauccaaagccagaag

SEQ ID NO: 10040 - RNA, 19 nt, artificial
  Oligomer
cuucucucccaacauguuc

SEQ ID NO: 10041 - RNA, 19 nt, artificial
  Oligomer
uccacauugagaccucuuu

SEQ ID NO: 10042 - RNA, 19 nt, artificial
  Oligomer
uuuggugacagaagaaaac

SEQ ID NO: 10043 - RNA, 19 nt, artificial
  Oligomer
aagaaaacugccaacucag

SEQ ID NO: 10044 - RNA, 19 nt, artificial
  Oligomer
uucaaccaaaggagcagcu

SEQ ID NO: 10045 - RNA, 19 nt, artificial
  Oligomer
uuaagcugcugccgaacuu

SEQ ID NO: 10046 - RNA, 19 nt, artificial
  Oligomer
auuaaucagggcauucugg

SEQ ID NO: 10047 - RNA, 19 nt, artificial
  Oligomer
cuuucucuuauugucaagc

SEQ ID NO: 10048 - RNA, 19 nt, artificial
  Oligomer
cucuauacacauaaccuug

SEQ ID NO: 10049 - RNA, 19 nt, artificial
  Oligomer
ucuauacacauaaccuugu

SEQ ID NO: 10050 - RNA, 19 nt, artificial
  Oligomer
auaaccuuguccuucacau

SEQ ID NO: 10051 - RNA, 19 nt, artificial
  Oligomer
uacugucaagcucuuucug

SEQ ID NO: 10052 - RNA, 19 nt, artificial
  Oligomer
ucuccaaagaaaagcgacu

SEQ ID NO: 10053 - RNA, 19 nt, artificial
  Oligomer
uuccaugggaaaacuguca

SEQ ID NO: 10054 - RNA, 19 nt, artificial
  Oligomer
ucagacacagaaaucaacu

SEQ ID NO: 10055 - RNA, 19 nt, artificial
  Oligomer
uccuuuagggccaucaagu

SEQ ID NO: 10056 - RNA, 19 nt, artificial
  Oligomer
cucagcagccaugacuuug

SEQ ID NO: 10057 - RNA, 19 nt, artificial
  Oligomer
uguaauugcgaaugauguc

SEQ ID NO: 10058 - RNA, 19 nt, artificial
  Oligomer
uugagaccucuuuugguga

SEQ ID NO: 10059 - RNA, 19 nt, artificial
  Oligomer
uucugaaagcugagcccau

SEQ ID NO: 10060 - RNA, 19 nt, artificial
  Oligomer
ucaauuaccaaaccaggcu

SEQ ID NO: 10061 - RNA, 19 nt, artificial
  Oligomer
aaaacuaagggagugaagc

SEQ ID NO: 10062 - RNA, 19 nt, artificial
  Oligomer
uaacgaugagaggacccuc

SEQ ID NO: 10063 - RNA, 19 nt, artificial
  Oligomer
uuugugugcgugcccaaaa

SEQ ID NO: 10064 - RNA, 19 nt, artificial
  Oligomer
auucagcucuugcaauuuc

SEQ ID NO: 10065 - RNA, 19 nt, artificial
  Oligomer
cugucuuuccaccacaaac

SEQ ID NO: 10066 - RNA, 19 nt, artificial
  Oligomer
guuuuuugugauaggguca

SEQ ID NO: 10067 - RNA, 19 nt, artificial
  Oligomer
guuauauacacagagugcg

SEQ ID NO: 10068 - RNA, 19 nt, artificial
  Oligomer
uucuugaguaacagcuguu

SEQ ID NO: 10069 - RNA, 19 nt, artificial
  Oligomer
ucugaucacucuuugccac

SEQ ID NO: 10070 - RNA, 19 nt, artificial
  Oligomer
cugugcucugaauauuccc

SEQ ID NO: 10071 - RNA, 19 nt, artificial
  Oligomer
ucucgaggauggcauacag

SEQ ID NO: 10072 - RNA, 19 nt, artificial
  Oligomer
uauccugaagauuacgcuu

SEQ ID NO: 10073 - RNA, 19 nt, artificial
  Oligomer
aguucuuucuucguguagg

SEQ ID NO: 10074 - RNA, 19 nt, artificial
  Oligomer
cuucguguaggguucaacc

SEQ ID NO: 10075 - RNA, 19 nt, artificial
  Oligomer
augaguucuaggaugcuuu

SEQ ID NO: 10076 - RNA, 19 nt, artificial
  Oligomer
ugugugcgugcccaaaaug

SEQ ID NO: 10077 - RNA, 19 nt, artificial
  Oligomer
cucaacuucacagugaacu

SEQ ID NO: 10078 - RNA, 19 nt, artificial
  Oligomer
cuucacagugaacuggacc

SEQ ID NO: 10079 - RNA, 19 nt, artificial
  Oligomer
uuuccaccacaaacgagcu

SEQ ID NO: 10080 - RNA, 19 nt, artificial
  Oligomer
uguucucuguucugcaagg

SEQ ID NO: 10081 - RNA, 19 nt, artificial
  Oligomer
cagagugcgaacguuaacc

SEQ ID NO: 10082 - RNA, 19 nt, artificial
  Oligomer
ucuuguaaaucuuccaggc

SEQ ID NO: 10083 - RNA, 19 nt, artificial
  Oligomer
agugcgaacguuaaccuag

SEQ ID NO: 10084 - RNA, 19 nt, artificial
  Oligomer
aaccuuguccuucacauuu

SEQ ID NO: 10085 - RNA, 19 nt, artificial
  Oligomer
ucuguuugucuaacaucac

SEQ ID NO: 10086 - RNA, 19 nt, artificial
  Oligomer
uccugaagauuacgcuugc

SEQ ID NO: 10087 - RNA, 19 nt, artificial
  Oligomer
aaagcgacuauauugauca

SEQ ID NO: 10088 - RNA, 19 nt, artificial
  Oligomer
augucagggaaaguaacag

SEQ ID NO: 10089 - RNA, 19 nt, artificial
  Oligomer
ugcugaaguucguaccacu

SEQ ID NO: 10090 - RNA, 19 nt, artificial
  Oligomer
uucaaaacuaagggaguga

SEQ ID NO: 10091 - RNA, 19 nt, artificial
  Oligomer
aagggagugaagcucuuca

SEQ ID NO: 10092 - RNA, 19 nt, artificial
  Oligomer
auucguucuggugccagca

SEQ ID NO: 10093 - RNA, 19 nt, artificial
  Oligomer
uauaauucagcucuugcaa

SEQ ID NO: 10094 - RNA, 19 nt, artificial
  Oligomer
uucguagguguauuucugu

SEQ ID NO: 10095 - RNA, 19 nt, artificial
  Oligomer
auuccuccaacuuuuuaag

SEQ ID NO: 10096 - RNA, 19 nt, artificial
  Oligomer
uugaguaacagcuguucuu

SEQ ID NO: 10097 - RNA, 19 nt, artificial
  Oligomer
uucucuguucugcaagguu

SEQ ID NO: 10098 - RNA, 19 nt, artificial
  Oligomer
ucuuucuguuugucuaaca

SEQ ID NO: 10099 - RNA, 19 nt, artificial
  Oligomer
uuaaaucucugggcguuuu

SEQ ID NO: 10100 - RNA, 19 nt, artificial
  Oligomer
gcguuuuccagaauuuucc

SEQ ID NO: 10101 - RNA, 19 nt, artificial
  Oligomer
uagacaucuggauuggguc

SEQ ID NO: 10102 - RNA, 19 nt, artificial
  Oligomer
aagauuacgcuugcuuuuc

SEQ ID NO: 10103 - RNA, 19 nt, artificial
  Oligomer
auuggcucuggugcuuccu

SEQ ID NO: 10104 - RNA, 19 nt, artificial
  Oligomer
uaauacuuuccaaaggcau

SEQ ID NO: 10105 - RNA, 19 nt, artificial
  Oligomer
caugugaaugugauggccc

SEQ ID NO: 10106 - RNA, 19 nt, artificial
  Oligomer
uccuugcugaugaagccca

SEQ ID NO: 10107 - RNA, 19 nt, artificial
  Oligomer
auugagaccucuuuuggug

SEQ ID NO: 10108 - RNA, 19 nt, artificial
  Oligomer
uucguaccacugagacauc

SEQ ID NO: 10109 - RNA, 19 nt, artificial
  Oligomer
ucaguaacgaugagaggac

SEQ ID NO: 10110 - RNA, 19 nt, artificial
  Oligomer
aaauucagccgccagacug

SEQ ID NO: 10111 - RNA, 19 nt, artificial
  Oligomer
uguuccaauuccuccaacu

SEQ ID NO: 10112 - RNA, 19 nt, artificial
  Oligomer
cucguguucucuguucugc

SEQ ID NO: 10113 - RNA, 19 nt, artificial
  Oligomer
gucuuccugaaaauuaucc

SEQ ID NO: 10114 - RNA, 19 nt, artificial
  Oligomer
uguagcaagaaguuauucu

SEQ ID NO: 10115 - RNA, 19 nt, artificial
  Oligomer
agcaaaugaaacuuuucug

SEQ ID NO: 10116 - RNA, 19 nt, artificial
  Oligomer
cuuuucuaaccacugugcc

SEQ ID NO: 10117 - RNA, 19 nt, artificial
  Oligomer
acaugguggagucaggaag

SEQ ID NO: 10118 - RNA, 19 nt, artificial
  Oligomer
ugagacauccugccaccuu

SEQ ID NO: 10119 - RNA, 19 nt, artificial
  Oligomer
acuuccuaaauccuuuuac

SEQ ID NO: 10120 - RNA, 19 nt, artificial
  Oligomer
uuucaccaacagucucaac

SEQ ID NO: 10121 - RNA, 19 nt, artificial
  Oligomer
accaacagucucaacuuca

SEQ ID NO: 10122 - RNA, 19 nt, artificial
  Oligomer
ucccauaacacuuguuugu

SEQ ID NO: 10123 - RNA, 19 nt, artificial
  Oligomer
aacuugcugcagacucucc

SEQ ID NO: 10124 - RNA, 19 nt, artificial
  Oligomer
acucuccgcaacuauagug

SEQ ID NO: 10125 - RNA, 19 nt, artificial
  Oligomer
auccaagcaagcauugggc

SEQ ID NO: 10126 - RNA, 19 nt, artificial
  Oligomer
aagguuuugcauuugaagu

SEQ ID NO: 10127 - RNA, 19 nt, artificial
  Oligomer
auuaaaucucugggcguuu

SEQ ID NO: 10128 - RNA, 19 nt, artificial
  Oligomer
accugcuccaggaauuuug

SEQ ID NO: 10129 - RNA, 19 nt, artificial
  Oligomer
caacauguucagcuggucc

SEQ ID NO: 10130 - RNA, 19 nt, artificial
  Oligomer
guucagcugguccacauug

SEQ ID NO: 10131 - RNA, 19 nt, artificial
  Oligomer
auuggguuucaaaacuaag

SEQ ID NO: 10132 - RNA, 19 nt, artificial
  Oligomer
guucguagguguauuucug

SEQ ID NO: 10133 - RNA, 19 nt, artificial
  Oligomer
aguucaucauuaaucaggg

SEQ ID NO: 10134 - RNA, 19 nt, artificial
  Oligomer
ucagugacauucagcaacu

SEQ ID NO: 10135 - RNA, 19 nt, artificial
  Oligomer
aucacucuuugccacacca

SEQ ID NO: 10136 - RNA, 19 nt, artificial
  Oligomer
uguccuucacauuucugac

SEQ ID NO: 10137 - RNA, 19 nt, artificial
  Oligomer
uccuucacauuucugacuu

SEQ ID NO: 10138 - RNA, 19 nt, artificial
  Oligomer
acugugcucugaauauucc

SEQ ID NO: 10139 - RNA, 19 nt, artificial
  Oligomer
ucucugggcguuuuccaga

SEQ ID NO: 10140 - RNA, 19 nt, artificial
  Oligomer
augaucauagacaucugga

SEQ ID NO: 10141 - RNA, 19 nt, artificial
  Oligomer
ucgaggauggcauacagca

SEQ ID NO: 10142 - RNA, 19 nt, artificial
  Oligomer
ccuuauguuaugcuguagc

SEQ ID NO: 10143 - RNA, 19 nt, artificial
  Oligomer
aaaagcgacuauauugauc

SEQ ID NO: 10144 - RNA, 19 nt, artificial
  Oligomer
caggaggucaugaaaacgg

SEQ ID NO: 10145 - RNA, 19 nt, artificial
  Oligomer
uuccauuggcucuggugcu

SEQ ID NO: 10146 - RNA, 19 nt, artificial
  Oligomer
uucuuucuucguguagggu

SEQ ID NO: 10147 - RNA, 19 nt, artificial
  Oligomer
uuucuucguguaggguuca

SEQ ID NO: 10148 - RNA, 19 nt, artificial
  Oligomer
cugaugaagcccaugaugc

SEQ ID NO: 10149 - RNA, 19 nt, artificial
  Oligomer
uuaccaaaccaggcuggca

SEQ ID NO: 10150 - RNA, 19 nt, artificial
  Oligomer
uucaguaacgaugagagga

SEQ ID NO: 10151 - RNA, 19 nt, artificial
  Oligomer
uguucaucacuuuugugug

SEQ ID NO: 10152 - RNA, 19 nt, artificial
  Oligomer
cccaaaauguugaacuucc

SEQ ID NO: 10153 - RNA, 19 nt, artificial
  Oligomer
ucauguucguagguguauu

SEQ ID NO: 10154 - RNA, 19 nt, artificial
  Oligomer
uccuccaacuuuuuaagcu

SEQ ID NO: 10155 - RNA, 19 nt, artificial
  Oligomer
uccacuccacuaguucauc

SEQ ID NO: 10156 - RNA, 19 nt, artificial
  Oligomer
cuuccuuucucuuauuguc

SEQ ID NO: 10157 - RNA, 19 nt, artificial
  Oligomer
auauacacagagugcgaac

SEQ ID NO: 10158 - RNA, 19 nt, artificial
  Oligomer
ucuucuugaguaacagcug

SEQ ID NO: 10159 - RNA, 19 nt, artificial
  Oligomer
ugaguaacagcuguucuug

SEQ ID NO: 10160 - RNA, 19 nt, artificial
  Oligomer
uugccacaccauuggucuc

SEQ ID NO: 10161 - RNA, 19 nt, artificial
  Oligomer
ucuguucugcaagguuuug

SEQ ID NO: 10162 - RNA, 19 nt, artificial
  Oligomer
acugucaagcucuuucugu

SEQ ID NO: 10163 - RNA, 19 nt, artificial
  Oligomer
ugagccugauuaaaucucu

SEQ ID NO: 10164 - RNA, 19 nt, artificial
  Oligomer
uacgcuugcuuuuccuuau

SEQ ID NO: 10165 - RNA, 19 nt, artificial
  Oligomer
ugcuuuuccuuauguuaug

SEQ ID NO: 10166 - RNA, 19 nt, artificial
  Oligomer
uuccuuauguuaugcugua

SEQ ID NO: 10167 - RNA, 19 nt, artificial
  Oligomer
aaaugaaacuuuucugcgc

SEQ ID NO: 10168 - RNA, 19 nt, artificial
  Oligomer
augaaacuuuucugcgcgc

SEQ ID NO: 10169 - RNA, 19 nt, artificial
  Oligomer
aguaauacuuuccaaaggc

SEQ ID NO: 10170 - RNA, 19 nt, artificial
  Oligomer
auauucucagcagccauga

SEQ ID NO: 10171 - RNA, 19 nt, artificial
  Oligomer
aacauguucagcuggucca

SEQ ID NO: 10172 - RNA, 19 nt, artificial
  Oligomer
cacuucugaaagcugagcc

SEQ ID NO: 10173 - RNA, 19 nt, artificial
  Oligomer
uggcugacguuggagauca

SEQ ID NO: 10174 - RNA, 19 nt, artificial
  Oligomer
aguaacgaugagaggaccc

SEQ ID NO: 10175 - RNA, 19 nt, artificial
  Oligomer
ucacuuuugugugcgugcc

SEQ ID NO: 10176 - RNA, 19 nt, artificial
  Oligomer
ucuuuccaccacaaacgag

SEQ ID NO: 10177 - RNA, 19 nt, artificial
  Oligomer
acuuuuuaagcugcugccg

SEQ ID NO: 10178 - RNA, 19 nt, artificial
  Oligomer
cacauuucugacuuuacug

SEQ ID NO: 10179 - RNA, 19 nt, artificial
  Oligomer
cuuccugaaaauuauccug

SEQ ID NO: 10180 - RNA, 19 nt, artificial
  Oligomer
auuacgcuugcuuuuccuu

SEQ ID NO: 10181 - RNA, 19 nt, artificial
  Oligomer
acaggaggucaugaaaacg

SEQ ID NO: 10182 - RNA, 19 nt, artificial
  Oligomer
aaacggaugguggcaaaug

SEQ ID NO: 10183 - RNA, 19 nt, artificial
  Oligomer
uucuaaccacugugccagg

SEQ ID NO: 10184 - RNA, 19 nt, artificial
  Oligomer
ucucaggaauauucucagc

SEQ ID NO: 10185 - RNA, 19 nt, artificial
  Oligomer
ucaggaauauucucagcag

SEQ ID NO: 10186 - RNA, 19 nt, artificial
  Oligomer
uuuugugugcgugcccaaa

SEQ ID NO: 10187 - RNA, 19 nt, artificial
  Oligomer
ucagcucuugcaauuucac

SEQ ID NO: 10188 - RNA, 19 nt, artificial
  Oligomer
ugaaggugcggucccauaa

SEQ ID NO: 10189 - RNA, 19 nt, artificial
  Oligomer
uuuuuaagcugcugccgaa

SEQ ID NO: 10190 - RNA, 19 nt, artificial
  Oligomer
ugcagcugauccaagcaag

SEQ ID NO: 10191 - RNA, 19 nt, artificial
  Oligomer
cuuguuucugaucacucuu

SEQ ID NO: 10192 - RNA, 19 nt, artificial
  Oligomer
ucucuguucugcaagguuu

SEQ ID NO: 10193 - RNA, 19 nt, artificial
  Oligomer
caggaaagcgaaacuaccc

SEQ ID NO: 10194 - RNA, 19 nt, artificial
  Oligomer
uaaccuuguccuucacauu

SEQ ID NO: 10195 - RNA, 19 nt, artificial
  Oligomer
ugucuaacaucacugugcu

SEQ ID NO: 10196 - RNA, 19 nt, artificial
  Oligomer
agccugauuaaaucucugg

SEQ ID NO: 10197 - RNA, 19 nt, artificial
  Oligomer
cugaaaauuauccugaaga

SEQ ID NO: 10198 - RNA, 19 nt, artificial
  Oligomer
aauuauccugaagauuacg

SEQ ID NO: 10199 - RNA, 19 nt, artificial
  Oligomer
aacucagucuugauauauc

SEQ ID NO: 10200 - RNA, 19 nt, artificial
  Oligomer
ucaaccgcauggaagucag

SEQ ID NO: 10201 - RNA, 19 nt, artificial
  Oligomer
acccaugugaaugugaugg

SEQ ID NO: 10202 - RNA, 19 nt, artificial
  Oligomer
aggaccaagaagcuucucu

SEQ ID NO: 10203 - RNA, 19 nt, artificial
  Oligomer
agcuucucucccaacaugu

SEQ ID NO: 10204 - RNA, 19 nt, artificial
  Oligomer
ucaggaagaaggacagauu

SEQ ID NO: 10205 - RNA, 19 nt, artificial
  Oligomer
uaagggagugaagcucuuc

SEQ ID NO: 10206 - RNA, 19 nt, artificial
  Oligomer
ucauucguucuggugccag

SEQ ID NO: 10207 - RNA, 19 nt, artificial
  Oligomer
ugcaggugccgaaauucag

SEQ ID NO: 10208 - RNA, 19 nt, artificial
  Oligomer
gacuccuccauguucauca

SEQ ID NO: 10209 - RNA, 19 nt, artificial
  Oligomer
acuuuugugugcgugccca

SEQ ID NO: 10210 - RNA, 19 nt, artificial
  Oligomer
uaauucagcucuugcaauu

SEQ ID NO: 10211 - RNA, 19 nt, artificial
  Oligomer
augagcugcuggaaaagac

SEQ ID NO: 10212 - RNA, 19 nt, artificial
  Oligomer
uccaacuuuuuaagcugcu

SEQ ID NO: 10213 - RNA, 19 nt, artificial
  Oligomer
aacuauagugaaccaguuc

SEQ ID NO: 10214 - RNA, 19 nt, artificial
  Oligomer
agugacauucagcaacucu

SEQ ID NO: 10215 - RNA, 19 nt, artificial
  Oligomer
gugacauucagcaacucua

SEQ ID NO: 10216 - RNA, 19 nt, artificial
  Oligomer
uaacagcuguucuuguuuc

SEQ ID NO: 10217 - RNA, 19 nt, artificial
  Oligomer
ugucaagcucuuucuguuu

SEQ ID NO: 10218 - RNA, 19 nt, artificial
  Oligomer
cugagccugauuaaaucuc

SEQ ID NO: 10219 - RNA, 19 nt, artificial
  Oligomer
cugauuaaaucucugggcg

SEQ ID NO: 10220 - RNA, 19 nt, artificial
  Oligomer
aucucugggcguuuuccag

SEQ ID NO: 10221 - RNA, 19 nt, artificial
  Oligomer
cagaauuuuccuuucuucc

SEQ ID NO: 10222 - RNA, 19 nt, artificial
  Oligomer
aauuuuccuuucuuccuuc

SEQ ID NO: 10223 - RNA, 19 nt, artificial
  Oligomer
agauuacgcuugcuuuucc

SEQ ID NO: 10224 - RNA, 19 nt, artificial
  Oligomer
gcgacuauauugaucaucc

SEQ ID NO: 10225 - RNA, 19 nt, artificial
  Oligomer
cucaggaauauucucagca

SEQ ID NO: 10226 - RNA, 19 nt, artificial
  Oligomer
ucagggaaaguaacagcag

SEQ ID NO: 10227 - RNA, 19 nt, artificial
  Oligomer
uguaggguucaaccgcaug

SEQ ID NO: 10228 - RNA, 19 nt, artificial
  Oligomer
auguucagcugguccacau

SEQ ID NO: 10229 - RNA, 19 nt, artificial
  Oligomer
uguaccaaaggauggaggc

SEQ ID NO: 10230 - RNA, 19 nt, artificial
  Oligomer
auguucaucacuuuugugu

SEQ ID NO: 10231 - RNA, 19 nt, artificial
  Oligomer
cuuuuacuguauuucucuc

SEQ ID NO: 10232 - RNA, 19 nt, artificial
  Oligomer
caacuuuuuaagcugcugc

SEQ ID NO: 10233 - RNA, 19 nt, artificial
  Oligomer
agacucuccgcaacuauag

SEQ ID NO: 10234 - RNA, 19 nt, artificial
  Oligomer
ugucgagguuauauacaca

SEQ ID NO: 10235 - RNA, 19 nt, artificial
  Oligomer
gucgagguuauauacacag

SEQ ID NO: 10236 - RNA, 19 nt, artificial
  Oligomer
acuacuuccuuucucuuau

SEQ ID NO: 10237 - RNA, 19 nt, artificial
  Oligomer
acuuccuuucucuuauugu

SEQ ID NO: 10238 - RNA, 19 nt, artificial
  Oligomer
uucucuuauugucaagcau

SEQ ID NO: 10239 - RNA, 19 nt, artificial
  Oligomer
cuguucuuguuucugauca

SEQ ID NO: 10240 - RNA, 19 nt, artificial
  Oligomer
accauuggucucguguucu

SEQ ID NO: 10241 - RNA, 19 nt, artificial
  Oligomer
cuguucugcaagguuuugc

SEQ ID NO: 10242 - RNA, 19 nt, artificial
  Oligomer
ucugcaagguuuugcauuu

SEQ ID NO: 10243 - RNA, 19 nt, artificial
  Oligomer
ugaagucauauucaucuug

SEQ ID NO: 10244 - RNA, 19 nt, artificial
  Oligomer
ccuuucuuccuucagacag

SEQ ID NO: 10245 - RNA, 19 nt, artificial
  Oligomer
cuuucuuccuucagacagc

SEQ ID NO: 10246 - RNA, 19 nt, artificial
  Oligomer
cugaagauuacgcuugcuu

SEQ ID NO: 10247 - RNA, 19 nt, artificial
  Oligomer
uucuccaaagaaaagcgac

SEQ ID NO: 10248 - RNA, 19 nt, artificial
  Oligomer
auuuccaugggaaaacugu

SEQ ID NO: 10249 - RNA, 19 nt, artificial
  Oligomer
cuuucuucguguaggguuc

SEQ ID NO: 10250 - RNA, 19 nt, artificial
  Oligomer
ugaugcacccaucauucca

SEQ ID NO: 10251 - RNA, 19 nt, artificial
  Oligomer
uucagcugguccacauuga

SEQ ID NO: 10252 - RNA, 19 nt, artificial
  Oligomer
uuggugacagaagaaaacu

SEQ ID NO: 10253 - RNA, 19 nt, artificial
  Oligomer
auguuguaccaaaggaugg

SEQ ID NO: 10254 - RNA, 19 nt, artificial
  Oligomer
gaugagaggacccucauuc

SEQ ID NO: 10255 - RNA, 19 nt, artificial
  Oligomer
ucguucuggugccagcauu

SEQ ID NO: 10256 - RNA, 19 nt, artificial
  Oligomer
cuguauuucucucauucac

SEQ ID NO: 10257 - RNA, 19 nt, artificial
  Oligomer
ucaccaacagucucaacuu

SEQ ID NO: 10258 - RNA, 19 nt, artificial
  Oligomer
guuaggugccaagacuguc

SEQ ID NO: 10259 - RNA, 19 nt, artificial
  Oligomer
acuauagugaaccaguucu

SEQ ID NO: 10260 - RNA, 19 nt, artificial
  Oligomer
agguuauauacacagagug

SEQ ID NO: 10261 - RNA, 19 nt, artificial
  Oligomer
ugugaacuacuuccuuucu

SEQ ID NO: 10262 - RNA, 19 nt, artificial
  Oligomer
gugaacuacuuccuuucuc

SEQ ID NO: 10263 - RNA, 19 nt, artificial
  Oligomer
ucacucuuugccacaccau

SEQ ID NO: 10264 - RNA, 19 nt, artificial
  Oligomer
agguuuugcauuugaaguc

SEQ ID NO: 10265 - RNA, 19 nt, artificial
  Oligomer
uguaaaucuuccaggcucu

SEQ ID NO: 10266 - RNA, 19 nt, artificial
  Oligomer
ucuugauuucaugcucuau

SEQ ID NO: 10267 - RNA, 19 nt, artificial
  Oligomer
aggaaagcgaaacuacccg

SEQ ID NO: 10268 - RNA, 19 nt, artificial
  Oligomer
uauccaguuccuuuagggc

SEQ ID NO: 10269 - RNA, 19 nt, artificial
  Oligomer
uaaagcuggugaaccugcu

SEQ ID NO: 10270 - RNA, 19 nt, artificial
  Oligomer
aaugaugucagggaaagua

SEQ ID NO: 10271 - RNA, 19 nt, artificial
  Oligomer
gaauuuugagucaagcugc

SEQ ID NO: 10272 - RNA, 19 nt, artificial
  Oligomer
agaagcuucucucccaaca

SEQ ID NO: 10273 - RNA, 19 nt, artificial
  Oligomer
ugccaacucagcacuucug

SEQ ID NO: 10274 - RNA, 19 nt, artificial
  Oligomer
ugguggagucaggaagaag

SEQ ID NO: 10275 - RNA, 19 nt, artificial
  Oligomer
ugacguuggagaucaccac

SEQ ID NO: 10276 - RNA, 19 nt, artificial
  Oligomer
ugagaggacccucauucgu

SEQ ID NO: 10277 - RNA, 19 nt, artificial
  Oligomer
cucauucacaucuuuauca

SEQ ID NO: 10278 - RNA, 19 nt, artificial
  Oligomer
agcucuugcaauuucacca

SEQ ID NO: 10279 - RNA, 19 nt, artificial
  Oligomer
auagugaaccaguucugca

SEQ ID NO: 10280 - RNA, 19 nt, artificial
  Oligomer
ucaucauuaaucagggcau

SEQ ID NO: 10281 - RNA, 19 nt, artificial
  Oligomer
uguucuuguuucugaucac

SEQ ID NO: 10282 - RNA, 19 nt, artificial
  Oligomer
ugaucacucuuugccacac

SEQ ID NO: 10283 - RNA, 19 nt, artificial
  Oligomer
ugacuuuacugucaagcuc

SEQ ID NO: 10284 - RNA, 19 nt, artificial
  Oligomer
cuaacaucacugugcucug

SEQ ID NO: 10285 - RNA, 19 nt, artificial
  Oligomer
cacugugcucugaauauuc

SEQ ID NO: 10286 - RNA, 19 nt, artificial
  Oligomer
uccuuauguuaugcuguag

SEQ ID NO: 10287 - RNA, 19 nt, artificial
  Oligomer
ucccagucuugcuuuucua

SEQ ID NO: 10288 - RNA, 19 nt, artificial
  Oligomer
caaaugaaacuuuucugcg

SEQ ID NO: 10289 - RNA, 19 nt, artificial
  Oligomer
auauauccaguuccuuuag

SEQ ID NO: 10290 - RNA, 19 nt, artificial
  Oligomer
aucaaguuccauuggcucu

SEQ ID NO: 10291 - RNA, 19 nt, artificial
  Oligomer
aaaggcauggucuuuguca

SEQ ID NO: 10292 - RNA, 19 nt, artificial
  Oligomer
ugaugucagggaaaguaac

SEQ ID NO: 10293 - RNA, 19 nt, artificial
  Oligomer
ugaaagcugagcccaucgu

SEQ ID NO: 10294 - RNA, 19 nt, artificial
  Oligomer
ucuuucaauugcaggugcc

SEQ ID NO: 10295 - RNA, 19 nt, artificial
  Oligomer
gugcgugcccaaaauguug

SEQ ID NO: 10296 - RNA, 19 nt, artificial
  Oligomer
acuguauuucucucauuca

SEQ ID NO: 10297 - RNA, 19 nt, artificial
  Oligomer
uucucucauucacaucuuu

SEQ ID NO: 10298 - RNA, 19 nt, artificial
  Oligomer
ucaacuucacagugaacug

SEQ ID NO: 10299 - RNA, 19 nt, artificial
  Oligomer
gugcggucccauaacacuu

SEQ ID NO: 10300 - RNA, 19 nt, artificial
  Oligomer
aaucagggcauucugggua

SEQ ID NO: 10301 - RNA, 19 nt, artificial
  Oligomer
uaaguucagugacauucag

SEQ ID NO: 10302 - RNA, 19 nt, artificial
  Oligomer
uguucugcaagguuuugca

SEQ ID NO: 10303 - RNA, 19 nt, artificial
  Oligomer
uucaugcucuauacacaua

SEQ ID NO: 10304 - RNA, 19 nt, artificial
  Oligomer
aacguuaaccuagacagcu

SEQ ID NO: 10305 - RNA, 19 nt, artificial
  Oligomer
agcgacuauauugaucauc

SEQ ID NO: 10306 - RNA, 19 nt, artificial
  Oligomer
uggccuggaguaauacuuu

SEQ ID NO: 10307 - RNA, 19 nt, artificial
  Oligomer
aagcccaugaugcacccau

SEQ ID NO: 10308 - RNA, 19 nt, artificial
  Oligomer
aaguucguaccacugagac

SEQ ID NO: 10309 - RNA, 19 nt, artificial
  Oligomer
aaccaggcuggcacaauug

SEQ ID NO: 10310 - RNA, 19 nt, artificial
  Oligomer
uucguucuggugccagcau

SEQ ID NO: 10311 - RNA, 19 nt, artificial
  Oligomer
cuuucaauugcaggugccg

SEQ ID NO: 10312 - RNA, 19 nt, artificial
  Oligomer
cagcucuugcaauuucacc

SEQ ID NO: 10313 - RNA, 19 nt, artificial
  Oligomer
ucguagguguauuucuguu

SEQ ID NO: 10314 - RNA, 19 nt, artificial
  Oligomer
aauacaggcgcucugcugu

SEQ ID NO: 10315 - RNA, 19 nt, artificial
  Oligomer
aguucagugacauucagca

SEQ ID NO: 10316 - RNA, 19 nt, artificial
  Oligomer
guguucucuguucugcaag

SEQ ID NO: 10317 - RNA, 19 nt, artificial
  Oligomer
uuccagaauuuuccuuucu

SEQ ID NO: 10318 - RNA, 19 nt, artificial
  Oligomer
cagggauaacacacugcaa

SEQ ID NO: 10319 - RNA, 19 nt, artificial
  Oligomer
cguggagcuguaccagaaa

SEQ ID NO: 10320 - RNA, 19 nt, artificial
  Oligomer
ggucgggagaagaggaaaa

SEQ ID NO: 10321 - RNA, 19 nt, artificial
  Oligomer
gguggaaacccacaacgaa

SEQ ID NO: 10322 - RNA, 19 nt, artificial
  Oligomer
cgggagaagaggaaaaaaa

SEQ ID NO: 10323 - RNA, 19 nt, artificial
  Oligomer
ggcucaaguuaaaagugga

SEQ ID NO: 10324 - RNA, 19 nt, artificial
  Oligomer
ugcugaggcucaaguuaaa

SEQ ID NO: 10325 - RNA, 19 nt, artificial
  Oligomer
cccuguacaaccagcauaa

SEQ ID NO: 10326 - RNA, 19 nt, artificial
  Oligomer
ggccuuuccugcuucucau

SEQ ID NO: 10327 - RNA, 19 nt, artificial
  Oligomer
gaacacuacuguaguuaga

SEQ ID NO: 10328 - RNA, 19 nt, artificial
  Oligomer
guggaaacccacaacgaaa

SEQ ID NO: 10329 - RNA, 19 nt, artificial
  Oligomer
ucgggagaagaggaaaaaa

SEQ ID NO: 10330 - RNA, 19 nt, artificial
  Oligomer
cacugcaaguggacaucaa

SEQ ID NO: 10331 - RNA, 19 nt, artificial
  Oligomer
cagagugguuaucuuuuga

SEQ ID NO: 10332 - RNA, 19 nt, artificial
  Oligomer
ccaccugcaagacuaucga

SEQ ID NO: 10333 - RNA, 19 nt, artificial
  Oligomer
aguuaaaaguggagcagca

SEQ ID NO: 10334 - RNA, 19 nt, artificial
  Oligomer
gcugaggcucaaguuaaaa

SEQ ID NO: 10335 - RNA, 19 nt, artificial
  Oligomer
ucgacauggagcuggugaa

SEQ ID NO: 10336 - RNA, 19 nt, artificial
  Oligomer
ccugcaagacuaucgacau

SEQ ID NO: 10337 - RNA, 19 nt, artificial
  Oligomer
gggagaagaggaaaaaaac

SEQ ID NO: 10338 - RNA, 19 nt, artificial
  Oligomer
gucgggagaagaggaaaaa

SEQ ID NO: 10339 - RNA, 19 nt, artificial
  Oligomer
uggucgggagaagaggaaa

SEQ ID NO: 10340 - RNA, 19 nt, artificial
  Oligomer
cugcugaggcucaaguuaa

SEQ ID NO: 10341 - RNA, 19 nt, artificial
  Oligomer
agguuauuuccgugggaua

SEQ ID NO: 10342 - RNA, 19 nt, artificial
  Oligomer
ccuacauuuggagccugga

SEQ ID NO: 10343 - RNA, 19 nt, artificial
  Oligomer
uguucuucaacacaucaga

SEQ ID NO: 10344 - RNA, 19 nt, artificial
  Oligomer
gcgugcuaaugguggaaac

SEQ ID NO: 10345 - RNA, 19 nt, artificial
  Oligomer
ggagaagaggaaaaaaacu

SEQ ID NO: 10346 - RNA, 19 nt, artificial
  Oligomer
cccuauucaagaccaccca

SEQ ID NO: 10347 - RNA, 19 nt, artificial
  Oligomer
ccaccauucauggcaugaa

SEQ ID NO: 10348 - RNA, 19 nt, artificial
  Oligomer
cuagguuauuuccguggga

SEQ ID NO: 10349 - RNA, 19 nt, artificial
  Oligomer
ugguggaaacccacaacga

SEQ ID NO: 10350 - RNA, 19 nt, artificial
  Oligomer
cuaucgacauggagcuggu

SEQ ID NO: 10351 - RNA, 19 nt, artificial
  Oligomer
ccaucuagguuauuuccgu

SEQ ID NO: 10352 - RNA, 19 nt, artificial
  Oligomer
ucagcuccacggagaagaa

SEQ ID NO: 10353 - RNA, 19 nt, artificial
  Oligomer
uaaugguggaaacccacaa

SEQ ID NO: 10354 - RNA, 19 nt, artificial
  Oligomer
aacccacaacgaaaucuau

SEQ ID NO: 10355 - RNA, 19 nt, artificial
  Oligomer
ugcuaaugguggaaaccca

SEQ ID NO: 10356 - RNA, 19 nt, artificial
  Oligomer
ggaacacuacuguaguuag

SEQ ID NO: 10357 - RNA, 19 nt, artificial
  Oligomer
ccaccuucugguaccagau

SEQ ID NO: 10358 - RNA, 19 nt, artificial
  Oligomer
cauuaaagauggagagagg

SEQ ID NO: 10359 - RNA, 19 nt, artificial
  Oligomer
aguucaagcagaguacaca

SEQ ID NO: 10360 - RNA, 19 nt, artificial
  Oligomer
cugucugcacuauuccuuu

SEQ ID NO: 10361 - RNA, 19 nt, artificial
  Oligomer
ugcggaucucugugucauu

SEQ ID NO: 10362 - RNA, 19 nt, artificial
  Oligomer
agcagcuguccaacaugau

SEQ ID NO: 10363 - RNA, 19 nt, artificial
  Oligomer
cggcagcuguacauugacu

SEQ ID NO: 10364 - RNA, 19 nt, artificial
  Oligomer
gagcuguaccagaaauaca

SEQ ID NO: 10365 - RNA, 19 nt, artificial
  Oligomer
gcccuguacaaccagcaua

SEQ ID NO: 10366 - RNA, 19 nt, artificial
  Oligomer
agcccuggacaccaacuau

SEQ ID NO: 10367 - RNA, 19 nt, artificial
  Oligomer
ccugugacagcagggauaa

SEQ ID NO: 10368 - RNA, 19 nt, artificial
  Oligomer
accagaaauacagcaacaa

SEQ ID NO: 10369 - RNA, 19 nt, artificial
  Oligomer
cgcgugcuaaugguggaaa

SEQ ID NO: 10370 - RNA, 19 nt, artificial
  Oligomer
auaacacacugcaagugga

SEQ ID NO: 10371 - RNA, 19 nt, artificial
  Oligomer
gcagggauaacacacugca

SEQ ID NO: 10372 - RNA, 19 nt, artificial
  Oligomer
gccugucugcacuauuccu

SEQ ID NO: 10373 - RNA, 19 nt, artificial
  Oligomer
uggccaccauucauggcau

SEQ ID NO: 10374 - RNA, 19 nt, artificial
  Oligomer
ucgccagagugguuaucuu

SEQ ID NO: 10375 - RNA, 19 nt, artificial
  Oligomer
aaguggacaucaacggguu

SEQ ID NO: 10376 - RNA, 19 nt, artificial
  Oligomer
aauuccuggcgauaccuca

SEQ ID NO: 10377 - RNA, 19 nt, artificial
  Oligomer
cacaucagagcuccgagaa

SEQ ID NO: 10378 - RNA, 19 nt, artificial
  Oligomer
acacaucagagcuccgaga

SEQ ID NO: 10379 - RNA, 19 nt, artificial
  Oligomer
ccugccugucugcacuauu

SEQ ID NO: 10380 - RNA, 19 nt, artificial
  Oligomer
uggacacgcaguacagcaa

SEQ ID NO: 10381 - RNA, 19 nt, artificial
  Oligomer
aacuauugcuucagcucca

SEQ ID NO: 10382 - RNA, 19 nt, artificial
  Oligomer
cccacaacgaaaucuauga

SEQ ID NO: 10383 - RNA, 19 nt, artificial
  Oligomer
ggcagcuguacauugacuu

SEQ ID NO: 10384 - RNA, 19 nt, artificial
  Oligomer
gagugguuaucuuuugaug

SEQ ID NO: 10385 - RNA, 19 nt, artificial
  Oligomer
ucugcugaggcucaaguua

SEQ ID NO: 10386 - RNA, 19 nt, artificial
  Oligomer
caaguucaagcagaguaca

SEQ ID NO: 10387 - RNA, 19 nt, artificial
  Oligomer
uccgugggauacugagaca

SEQ ID NO: 10388 - RNA, 19 nt, artificial
  Oligomer
cugcggaucucugugucau

SEQ ID NO: 10389 - RNA, 19 nt, artificial
  Oligomer
gugacagcagggauaacac

SEQ ID NO: 10390 - RNA, 19 nt, artificial
  Oligomer
cagcaacaauuccuggcga

SEQ ID NO: 10391 - RNA, 19 nt, artificial
  Oligomer
ucaaguuaaaaguggagca

SEQ ID NO: 10392 - RNA, 19 nt, artificial
  Oligomer
uaugacaaguucaagcaga

SEQ ID NO: 10393 - RNA, 19 nt, artificial
  Oligomer
uguacauugacuuccgcaa

SEQ ID NO: 10394 - RNA, 19 nt, artificial
  Oligomer
cuagacccuuucuccucca

SEQ ID NO: 10395 - RNA, 19 nt, artificial
  Oligomer
ugaccuggccaccauucau

SEQ ID NO: 10396 - RNA, 19 nt, artificial
  Oligomer
acugcaaguggacaucaac

SEQ ID NO: 10397 - RNA, 19 nt, artificial
  Oligomer
uccugugacagcagggaua

SEQ ID NO: 10398 - RNA, 19 nt, artificial
  Oligomer
gguuaucuuuugaugucac

SEQ ID NO: 10399 - RNA, 19 nt, artificial
  Oligomer
agcaacaauuccuggcgau

SEQ ID NO: 10400 - RNA, 19 nt, artificial
  Oligomer
caagacuaucgacauggag

SEQ ID NO: 10401 - RNA, 19 nt, artificial
  Oligomer
gggaacacuacuguaguua

SEQ ID NO: 10402 - RNA, 19 nt, artificial
  Oligomer
uggagcuguaccagaaaua

SEQ ID NO: 10403 - RNA, 19 nt, artificial
  Oligomer
ucaagaccacccaccuucu

SEQ ID NO: 10404 - RNA, 19 nt, artificial
  Oligomer
agcuguccaacaugaucgu

SEQ ID NO: 10405 - RNA, 19 nt, artificial
  Oligomer
aucuuuugaugucaccgga

SEQ ID NO: 10406 - RNA, 19 nt, artificial
  Oligomer
ugguuaucuuuugauguca

SEQ ID NO: 10407 - RNA, 19 nt, artificial
  Oligomer
gacucgccagagugguuau

SEQ ID NO: 10408 - RNA, 19 nt, artificial
  Oligomer
ugaggcucaaguuaaaagu

SEQ ID NO: 10409 - RNA, 19 nt, artificial
  Oligomer
gaaaucuaugacaaguuca

SEQ ID NO: 10410 - RNA, 19 nt, artificial
  Oligomer
ucgcgcccaucuagguuau

SEQ ID NO: 10411 - RNA, 19 nt, artificial
  Oligomer
acugcggaucucuguguca

SEQ ID NO: 10412 - RNA, 19 nt, artificial
  Oligomer
gucugcugaggcucaaguu

SEQ ID NO: 10413 - RNA, 19 nt, artificial
  Oligomer
agcagaguacacacagcau

SEQ ID NO: 10414 - RNA, 19 nt, artificial
  Oligomer
caccauucauggcaugaac

SEQ ID NO: 10415 - RNA, 19 nt, artificial
  Oligomer
agggauaacacacugcaag

SEQ ID NO: 10416 - RNA, 19 nt, artificial
  Oligomer
cuuuugaugucaccggagu

SEQ ID NO: 10417 - RNA, 19 nt, artificial
  Oligomer
gcucaaguuaaaaguggag

SEQ ID NO: 10418 - RNA, 19 nt, artificial
  Oligomer
guucaagcagaguacacac

SEQ ID NO: 10419 - RNA, 19 nt, artificial
  Oligomer
accugcaagacuaucgaca

SEQ ID NO: 10420 - RNA, 19 nt, artificial
  Oligomer
cauugacuuccgcaaggac

SEQ ID NO: 10421 - RNA, 19 nt, artificial
  Oligomer
cccuggacaccaacuauug

SEQ ID NO: 10422 - RNA, 19 nt, artificial
  Oligomer
acaucaacggguucacuac

SEQ ID NO: 10423 - RNA, 19 nt, artificial
  Oligomer
acagcagggauaacacacu

SEQ ID NO: 10424 - RNA, 19 nt, artificial
  Oligomer
agagugguuaucuuuugau

SEQ ID NO: 10425 - RNA, 19 nt, artificial
  Oligomer
cacacagcauauauauguu

SEQ ID NO: 10426 - RNA, 19 nt, artificial
  Oligomer
augacaaguucaagcagag

SEQ ID NO: 10427 - RNA, 19 nt, artificial
  Oligomer
cuaaugguggaaacccaca

SEQ ID NO: 10428 - RNA, 19 nt, artificial
  Oligomer
gcuaaugguggaaacccac

SEQ ID NO: 10429 - RNA, 19 nt, artificial
  Oligomer
gagaagaggaaaaaaacuu

SEQ ID NO: 10430 - RNA, 19 nt, artificial
  Oligomer
agugguuaucuuuugaugu

SEQ ID NO: 10431 - RNA, 19 nt, artificial
  Oligomer
gccagagugguuaucuuuu

SEQ ID NO: 10432 - RNA, 19 nt, artificial
  Oligomer
cuaugacaaguucaagcag

SEQ ID NO: 10433 - RNA, 19 nt, artificial
  Oligomer
agacuaucgacauggagcu

SEQ ID NO: 10434 - RNA, 19 nt, artificial
  Oligomer
cgcgcccaucuagguuauu

SEQ ID NO: 10435 - RNA, 19 nt, artificial
  Oligomer
uggagcagcuguccaacau

SEQ ID NO: 10436 - RNA, 19 nt, artificial
  Oligomer
acaucagagcuccgagaag

SEQ ID NO: 10437 - RNA, 19 nt, artificial
  Oligomer
cgcccaucuagguuauuuc

SEQ ID NO: 10438 - RNA, 19 nt, artificial
  Oligomer
cuauuccuuugcccggcau

SEQ ID NO: 10439 - RNA, 19 nt, artificial
  Oligomer
ggaucucugugucauuggg

SEQ ID NO: 10440 - RNA, 19 nt, artificial
  Oligomer
acauugacuuccgcaagga

SEQ ID NO: 10441 - RNA, 19 nt, artificial
  Oligomer
caaguggacaucaacgggu

SEQ ID NO: 10442 - RNA, 19 nt, artificial
  Oligomer
ugugacagcagggauaaca

SEQ ID NO: 10443 - RNA, 19 nt, artificial
  Oligomer
gaggaaaaaaacuuuugag

SEQ ID NO: 10444 - RNA, 19 nt, artificial
  Oligomer
uuccuuugcccggcaucaa

SEQ ID NO: 10445 - RNA, 19 nt, artificial
  Oligomer
auuaaagauggagagagga

SEQ ID NO: 10446 - RNA, 19 nt, artificial
  Oligomer
uacauuuggagccuggaca

SEQ ID NO: 10447 - RNA, 19 nt, artificial
  Oligomer
uauucaagaccacccaccu

SEQ ID NO: 10448 - RNA, 19 nt, artificial
  Oligomer
ugaugucaccggaguugug

SEQ ID NO: 10449 - RNA, 19 nt, artificial
  Oligomer
ggaaaaaaacuuuugagac

SEQ ID NO: 10450 - RNA, 19 nt, artificial
  Oligomer
uauccaccugcaagacuau

SEQ ID NO: 10451 - RNA, 19 nt, artificial
  Oligomer
ccugucugcacuauuccuu

SEQ ID NO: 10452 - RNA, 19 nt, artificial
  Oligomer
acauuuggagccuggacac

SEQ ID NO: 10453 - RNA, 19 nt, artificial
  Oligomer
ccuauucaagaccacccac

SEQ ID NO: 10454 - RNA, 19 nt, artificial
  Oligomer
uggacaccaacuauugcuu

SEQ ID NO: 10455 - RNA, 19 nt, artificial
  Oligomer
ggagcuguaccagaaauac

SEQ ID NO: 10456 - RNA, 19 nt, artificial
  Oligomer
cacagcauauauauguucu

SEQ ID NO: 10457 - RNA, 19 nt, artificial
  Oligomer
gguuauuuccgugggauac

SEQ ID NO: 10458 - RNA, 19 nt, artificial
  Oligomer
uaaagauggagagaggacu

SEQ ID NO: 10459 - RNA, 19 nt, artificial
  Oligomer
gacagcagggauaacacac

SEQ ID NO: 10460 - RNA, 19 nt, artificial
  Oligomer
aauugagggcuuucgccuu

SEQ ID NO: 10461 - RNA, 19 nt, artificial
  Oligomer
uuuugaugucaccggaguu

SEQ ID NO: 10462 - RNA, 19 nt, artificial
  Oligomer
agacuuuuccguugccgcu

SEQ ID NO: 10463 - RNA, 19 nt, artificial
  Oligomer
cugaggcucaaguuaaaag

SEQ ID NO: 10464 - RNA, 19 nt, artificial
  Oligomer
cuuuugagacuuuuccguu

SEQ ID NO: 10465 - RNA, 19 nt, artificial
  Oligomer
ugacaaguucaagcagagu

SEQ ID NO: 10466 - RNA, 19 nt, artificial
  Oligomer
acgaaaucuaugacaaguu

SEQ ID NO: 10467 - RNA, 19 nt, artificial
  Oligomer
uuuccgugggauacugaga

SEQ ID NO: 10468 - RNA, 19 nt, artificial
  Oligomer
uauuuccgugggauacuga

SEQ ID NO: 10469 - RNA, 19 nt, artificial
  Oligomer
gggcuguauuuaaggacac

SEQ ID NO: 10470 - RNA, 19 nt, artificial
  Oligomer
agcuguaccagaaauacag

SEQ ID NO: 10471 - RNA, 19 nt, artificial
  Oligomer
cccauuaaagauggagaga

SEQ ID NO: 10472 - RNA, 19 nt, artificial
  Oligomer
ugcccaucguguacuacgu

SEQ ID NO: 10473 - RNA, 19 nt, artificial
  Oligomer
cuacauuuggagccuggac

SEQ ID NO: 10474 - RNA, 19 nt, artificial
  Oligomer
gcuaccaugccaacuucug

SEQ ID NO: 10475 - RNA, 19 nt, artificial
  Oligomer
agggcuaccaugccaacuu

SEQ ID NO: 10476 - RNA, 19 nt, artificial
  Oligomer
gccuuuccugcuucucaug

SEQ ID NO: 10477 - RNA, 19 nt, artificial
  Oligomer
acacacugcaaguggacau

SEQ ID NO: 10478 - RNA, 19 nt, artificial
  Oligomer
uguaccagaaauacagcaa

SEQ ID NO: 10479 - RNA, 19 nt, artificial
  Oligomer
gaggcucaaguuaaaagug

SEQ ID NO: 10480 - RNA, 19 nt, artificial
  Oligomer
guucuucaacacaucagag

SEQ ID NO: 10481 - RNA, 19 nt, artificial
  Oligomer
acuauuccuuugcccggca

SEQ ID NO: 10482 - RNA, 19 nt, artificial
  Oligomer
ggcuaccaugccaacuucu

SEQ ID NO: 10483 - RNA, 19 nt, artificial
  Oligomer
cugcaaguggacaucaacg

SEQ ID NO: 10484 - RNA, 19 nt, artificial
  Oligomer
cauccuagacccuuucucc

SEQ ID NO: 10485 - RNA, 19 nt, artificial
  Oligomer
caagcagaguacacacagc

SEQ ID NO: 10486 - RNA, 19 nt, artificial
  Oligomer
caucuagguuauuuccgug

SEQ ID NO: 10487 - RNA, 19 nt, artificial
  Oligomer
aacacuacuguaguuagau

SEQ ID NO: 10488 - RNA, 19 nt, artificial
  Oligomer
ggaaauugagggcuuucgc

SEQ ID NO: 10489 - RNA, 19 nt, artificial
  Oligomer
ucaagcagaguacacacag

SEQ ID NO: 10490 - RNA, 19 nt, artificial
  Oligomer
ucuaugacaaguucaagca

SEQ ID NO: 10491 - RNA, 19 nt, artificial
  Oligomer
caccugcaagacuaucgac

SEQ ID NO: 10492 - RNA, 19 nt, artificial
  Oligomer
cuguacauugacuuccgca

SEQ ID NO: 10493 - RNA, 19 nt, artificial
  Oligomer
ucuucaacacaucagagcu

SEQ ID NO: 10494 - RNA, 19 nt, artificial
  Oligomer
aacgaaaucuaugacaagu

SEQ ID NO: 10495 - RNA, 19 nt, artificial
  Oligomer
cacaacgaaaucuaugaca

SEQ ID NO: 10496 - RNA, 19 nt, artificial
  Oligomer
cggaucucugugucauugg

SEQ ID NO: 10497 - RNA, 19 nt, artificial
  Oligomer
uguauuuaaggacacccgu

SEQ ID NO: 10498 - RNA, 19 nt, artificial
  Oligomer
auucaagaccacccaccuu

SEQ ID NO: 10499 - RNA, 19 nt, artificial
  Oligomer
caaguuaaaaguggagcag

SEQ ID NO: 10500 - RNA, 19 nt, artificial
  Oligomer
acaaguucaagcagaguac

SEQ ID NO: 10501 - RNA, 19 nt, artificial
  Oligomer
aaucuaugacaaguucaag

SEQ ID NO: 10502 - RNA, 19 nt, artificial
  Oligomer
auuccuuugcccggcauca

SEQ ID NO: 10503 - RNA, 19 nt, artificial
  Oligomer
ggacaccaacuauugcuuc

SEQ ID NO: 10504 - RNA, 19 nt, artificial
  Oligomer
aacacacugcaaguggaca

SEQ ID NO: 10505 - RNA, 19 nt, artificial
  Oligomer
cagcagggauaacacacug

SEQ ID NO: 10506 - RNA, 19 nt, artificial
  Oligomer
cuguaccagaaauacagca

SEQ ID NO: 10507 - RNA, 19 nt, artificial
  Oligomer
uaaaaguggagcagcacgu

SEQ ID NO: 10508 - RNA, 19 nt, artificial
  Oligomer
caacacaucagagcuccga

SEQ ID NO: 10509 - RNA, 19 nt, artificial
  Oligomer
aaagauggagagaggacug

SEQ ID NO: 10510 - RNA, 19 nt, artificial
  Oligomer
guauuuaaggacacccgug

SEQ ID NO: 10511 - RNA, 19 nt, artificial
  Oligomer
guggacaucaacggguuca

SEQ ID NO: 10512 - RNA, 19 nt, artificial
  Oligomer
aagcagaguacacacagca

SEQ ID NO: 10513 - RNA, 19 nt, artificial
  Oligomer
acuuuugagacuuuuccgu

SEQ ID NO: 10514 - RNA, 19 nt, artificial
  Oligomer
aaugguggaaacccacaac

SEQ ID NO: 10515 - RNA, 19 nt, artificial
  Oligomer
auugcuucagcuccacgga

SEQ ID NO: 10516 - RNA, 19 nt, artificial
  Oligomer
uggacaucaacggguucac

SEQ ID NO: 10517 - RNA, 19 nt, artificial
  Oligomer
gcauccuagacccuuucuc

SEQ ID NO: 10518 - RNA, 19 nt, artificial
  Oligomer
acacuacuguaguuagauc

SEQ ID NO: 10519 - RNA, 19 nt, artificial
  Oligomer
aguggacaucaacggguuc

SEQ ID NO: 10520 - RNA, 19 nt, artificial
  Oligomer
cugugacagcagggauaac

SEQ ID NO: 10521 - RNA, 19 nt, artificial
  Oligomer
aucgacauggagcugguga

SEQ ID NO: 10522 - RNA, 19 nt, artificial
  Oligomer
guuauuuccgugggauacu

SEQ ID NO: 10523 - RNA, 19 nt, artificial
  Oligomer
aucgcgcccaucuagguua

SEQ ID NO: 10524 - RNA, 19 nt, artificial
  Oligomer
ccuguacaaccagcauaac

SEQ ID NO: 10525 - RNA, 19 nt, artificial
  Oligomer
guacauugacuuccgcaag

SEQ ID NO: 10526 - RNA, 19 nt, artificial
  Oligomer
ccaacuauugcuucagcuc

SEQ ID NO: 10527 - RNA, 19 nt, artificial
  Oligomer
guaccagaaauacagcaac

SEQ ID NO: 10528 - RNA, 19 nt, artificial
  Oligomer
uucaagcagaguacacaca

SEQ ID NO: 10529 - RNA, 19 nt, artificial
  Oligomer
auuuccgugggauacugag

SEQ ID NO: 10530 - RNA, 19 nt, artificial
  Oligomer
uccugccugucugcacuau

SEQ ID NO: 10531 - RNA, 19 nt, artificial
  Oligomer
uugacuuccgcaaggaccu

SEQ ID NO: 10532 - RNA, 19 nt, artificial
  Oligomer
uccacggagaagaacugcu

SEQ ID NO: 10533 - RNA, 19 nt, artificial
  Oligomer
auggcaugaaccggccuuu

SEQ ID NO: 10534 - RNA, 19 nt, artificial
  Oligomer
cauucauggcaugaaccgg

SEQ ID NO: 10535 - RNA, 19 nt, artificial
  Oligomer
ccucccgcaaagacuuuuc

SEQ ID NO: 10536 - RNA, 19 nt, artificial
  Oligomer
aggcucaaguuaaaagugg

SEQ ID NO: 10537 - RNA, 19 nt, artificial
  Oligomer
uaccugaacccguguugcu

SEQ ID NO: 10538 - RNA, 19 nt, artificial
  Oligomer
ccuggacaccaacuauugc

SEQ ID NO: 10539 - RNA, 19 nt, artificial
  Oligomer
gccaccauucauggcauga

SEQ ID NO: 10540 - RNA, 19 nt, artificial
  Oligomer
gugguuaucuuuugauguc

SEQ ID NO: 10541 - RNA, 19 nt, artificial
  Oligomer
uauguucuucaacacauca

SEQ ID NO: 10542 - RNA, 19 nt, artificial
  Oligomer
auauguucuucaacacauc

SEQ ID NO: 10543 - RNA, 19 nt, artificial
  Oligomer
cagcauauauauguucuuc

SEQ ID NO: 10544 - RNA, 19 nt, artificial
  Oligomer
gcccaucuagguuauuucc

SEQ ID NO: 10545 - RNA, 19 nt, artificial
  Oligomer
cuguauuuaaggacacccg

SEQ ID NO: 10546 - RNA, 19 nt, artificial
  Oligomer
ggcuguauuuaaggacacc

SEQ ID NO: 10547 - RNA, 19 nt, artificial
  Oligomer
uguccaacaugaucgugcg

SEQ ID NO: 10548 - RNA, 19 nt, artificial
  Oligomer
acuauugcuucagcuccac

SEQ ID NO: 10549 - RNA, 19 nt, artificial
  Oligomer
auccuagacccuuucuccu

SEQ ID NO: 10550 - RNA, 19 nt, artificial
  Oligomer
ucuuuugaugucaccggag

SEQ ID NO: 10551 - RNA, 19 nt, artificial
  Oligomer
gcuguaccagaaauacagc

SEQ ID NO: 10552 - RNA, 19 nt, artificial
  Oligomer
aaguucaagcagaguacac

SEQ ID NO: 10553 - RNA, 19 nt, artificial
  Oligomer
ccacaacgaaaucuaugac

SEQ ID NO: 10554 - RNA, 19 nt, artificial
  Oligomer
ccauuaaagauggagagag

SEQ ID NO: 10555 - RNA, 19 nt, artificial
  Oligomer
gcuguacauugacuuccgc

SEQ ID NO: 10556 - RNA, 19 nt, artificial
  Oligomer
auuccuggcgauaccucag

SEQ ID NO: 10557 - RNA, 19 nt, artificial
  Oligomer
uuuugagacuuuuccguug

SEQ ID NO: 10558 - RNA, 19 nt, artificial
  Oligomer
gaaacccacaacgaaaucu

SEQ ID NO: 10559 - RNA, 19 nt, artificial
  Oligomer
uagguuauuuccgugggau

SEQ ID NO: 10560 - RNA, 19 nt, artificial
  Oligomer
cagcuguccaacaugaucg

SEQ ID NO: 10561 - RNA, 19 nt, artificial
  Oligomer
agcuguacauugacuuccg

SEQ ID NO: 10562 - RNA, 19 nt, artificial
  Oligomer
acacugcaaguggacauca

SEQ ID NO: 10563 - RNA, 19 nt, artificial
  Oligomer
gccucccgcaaagacuuuu

SEQ ID NO: 10564 - RNA, 19 nt, artificial
  Oligomer
aaaaguggagcagcacgug

SEQ ID NO: 10565 - RNA, 19 nt, artificial
  Oligomer
aacacaucagagcuccgag

SEQ ID NO: 10566 - RNA, 19 nt, artificial
  Oligomer
acuacuacgccaaggaggu

SEQ ID NO: 10567 - RNA, 19 nt, artificial
  Oligomer
guacaaccagcauaacccg

SEQ ID NO: 10568 - RNA, 19 nt, artificial
  Oligomer
cuaccaugccaacuucugc

SEQ ID NO: 10569 - RNA, 19 nt, artificial
  Oligomer
caauuccuggcgauaccuc

SEQ ID NO: 10570 - RNA, 19 nt, artificial
  Oligomer
gacuaucgacauggagcug

SEQ ID NO: 10571 - RNA, 19 nt, artificial
  Oligomer
aagacuaucgacauggagc

SEQ ID NO: 10572 - RNA, 19 nt, artificial
  Oligomer
cuauugcuucagcuccacg

SEQ ID NO: 10573 - RNA, 19 nt, artificial
  Oligomer
uaacacacugcaaguggac

SEQ ID NO: 10574 - RNA, 19 nt, artificial
  Oligomer
gggaaauugagggcuuucg

SEQ ID NO: 10575 - RNA, 19 nt, artificial
  Oligomer
uugaugucaccggaguugu

SEQ ID NO: 10576 - RNA, 19 nt, artificial
  Oligomer
aaauacagcaacaauuccu

SEQ ID NO: 10577 - RNA, 19 nt, artificial
  Oligomer
caccuucugguaccagauc

SEQ ID NO: 10578 - RNA, 19 nt, artificial
  Oligomer
aacaugaucgugcgcuccu

SEQ ID NO: 10579 - RNA, 19 nt, artificial
  Oligomer
acacgcaguacagcaaggu

SEQ ID NO: 10580 - RNA, 19 nt, artificial
  Oligomer
aagggcuaccaugccaacu

SEQ ID NO: 10581 - RNA, 19 nt, artificial
  Oligomer
accaacuauugcuucagcu

SEQ ID NO: 10582 - RNA, 19 nt, artificial
  Oligomer
acaccaacuauugcuucag

SEQ ID NO: 10583 - RNA, 19 nt, artificial
  Oligomer
cuggacaccaacuauugcu

SEQ ID NO: 10584 - RNA, 19 nt, artificial
  Oligomer
ugcaaguggacaucaacgg

SEQ ID NO: 10585 - RNA, 19 nt, artificial
  Oligomer
gaaauugagggcuuucgcc

SEQ ID NO: 10586 - RNA, 19 nt, artificial
  Oligomer
aacuuuugagacuuuuccg

SEQ ID NO: 10587 - RNA, 19 nt, artificial
  Oligomer
caacuauugcuucagcucc

SEQ ID NO: 10588 - RNA, 19 nt, artificial
  Oligomer
caccaacuauugcuucagc

SEQ ID NO: 10589 - RNA, 19 nt, artificial
  Oligomer
cacacugcaaguggacauc

SEQ ID NO: 10590 - RNA, 19 nt, artificial
  Oligomer
guuaaaaguggagcagcac

SEQ ID NO: 10591 - RNA, 19 nt, artificial
  Oligomer
acacacagcauauauaugu

SEQ ID NO: 10592 - RNA, 19 nt, artificial
  Oligomer
cgugcuaaugguggaaacc

SEQ ID NO: 10593 - RNA, 19 nt, artificial
  Oligomer
uaucgacauggagcuggug

SEQ ID NO: 10594 - RNA, 19 nt, artificial
  Oligomer
uuaaagauggagagaggac

SEQ ID NO: 10595 - RNA, 19 nt, artificial
  Oligomer
agcuccacggagaagaacu

SEQ ID NO: 10596 - RNA, 19 nt, artificial
  Oligomer
uagacccuuucuccuccag

SEQ ID NO: 10597 - RNA, 19 nt, artificial
  Oligomer
aaauugagggcuuucgccu

SEQ ID NO: 10598 - RNA, 19 nt, artificial
  Oligomer
uguacaaccagcauaaccc

SEQ ID NO: 10599 - RNA, 19 nt, artificial
  Oligomer
cuauucaagaccacccacc

SEQ ID NO: 10600 - RNA, 19 nt, artificial
  Oligomer
ccauucauggcaugaaccg

SEQ ID NO: 10601 - RNA, 19 nt, artificial
  Oligomer
ggauaacacacugcaagug

SEQ ID NO: 10602 - RNA, 19 nt, artificial
  Oligomer
uugagggcuuucgccuuag

SEQ ID NO: 10603 - RNA, 19 nt, artificial
  Oligomer
uuauuuccgugggauacug

SEQ ID NO: 10604 - RNA, 19 nt, artificial
  Oligomer
caucaacggguucacuacc

SEQ ID NO: 10605 - RNA, 19 nt, artificial
  Oligomer
cugcacuauuccuuugccc

SEQ ID NO: 10606 - RNA, 19 nt, artificial
  Oligomer
uacauugacuuccgcaagg

SEQ ID NO: 10607 - RNA, 19 nt, artificial
  Oligomer
uucagcuccacggagaaga

SEQ ID NO: 10608 - RNA, 19 nt, artificial
  Oligomer
aaguuaaaaguggagcagc

SEQ ID NO: 10609 - RNA, 19 nt, artificial
  Oligomer
gacuauccaccugcaagac

SEQ ID NO: 10610 - RNA, 19 nt, artificial
  Oligomer
aacaauuccuggcgauacc

SEQ ID NO: 10611 - RNA, 19 nt, artificial
  Oligomer
aauacagcaacaauuccug

SEQ ID NO: 10612 - RNA, 19 nt, artificial
  Oligomer
aaacuuuugagacuuuucc

SEQ ID NO: 10613 - RNA, 19 nt, artificial
  Oligomer
uuccugcuucucauggcca

SEQ ID NO: 10614 - RNA, 19 nt, artificial
  Oligomer
cucccgcaaagacuuuucc

SEQ ID NO: 10615 - RNA, 19 nt, artificial
  Oligomer
acaauuccuggcgauaccu

SEQ ID NO: 10616 - RNA, 19 nt, artificial
  Oligomer
gcuguccaacaugaucgug

SEQ ID NO: 10617 - RNA, 19 nt, artificial
  Oligomer
aucuaugacaaguucaagc

SEQ ID NO: 10618 - RNA, 19 nt, artificial
  Oligomer
acccacaacgaaaucuaug

SEQ ID NO: 10619 - RNA, 19 nt, artificial
  Oligomer
ucuagguuauuuccguggg

SEQ ID NO: 10620 - RNA, 19 nt, artificial
  Oligomer
accuucugguaccagaucg

SEQ ID NO: 10621 - RNA, 19 nt, artificial
  Oligomer
cuuuccugcuucucauggc

SEQ ID NO: 10622 - RNA, 19 nt, artificial
  Oligomer
gauaacacacugcaagugg

SEQ ID NO: 10623 - RNA, 19 nt, artificial
  Oligomer
gcuguauuuaaggacaccc

SEQ ID NO: 10624 - RNA, 19 nt, artificial
  Oligomer
uccuagacccuuucuccuc

SEQ ID NO: 10625 - RNA, 19 nt, artificial
  Oligomer
guuaucuuuugaugucacc

SEQ ID NO: 10626 - RNA, 19 nt, artificial
  Oligomer
ucaacacaucagagcuccg

SEQ ID NO: 10627 - RNA, 19 nt, artificial
  Oligomer
uauuccuuugcccggcauc

SEQ ID NO: 10628 - RNA, 19 nt, artificial
  Oligomer
uauuuaaggacacccgugc

SEQ ID NO: 10629 - RNA, 19 nt, artificial
  Oligomer
cuguacaaccagcauaacc

SEQ ID NO: 10630 - RNA, 19 nt, artificial
  Oligomer
ucccgcaaagacuuuuccc

SEQ ID NO: 10631 - RNA, 19 nt, artificial
  Oligomer
uacacacagcauauauaug

SEQ ID NO: 10632 - RNA, 19 nt, artificial
  Oligomer
aucucugugucauugggcg

SEQ ID NO: 10633 - RNA, 19 nt, artificial
  Oligomer
accaugccaacuucugccu

SEQ ID NO: 10634 - RNA, 19 nt, artificial
  Oligomer
acuauccaccugcaagacu

SEQ ID NO: 10635 - RNA, 19 nt, artificial
  Oligomer
gaucucugugucauugggc

SEQ ID NO: 10636 - RNA, 19 nt, artificial
  Oligomer
cagcuguacauugacuucc

SEQ ID NO: 10637 - RNA, 19 nt, artificial
  Oligomer
cucgccagagugguuaucu

SEQ ID NO: 10638 - RNA, 19 nt, artificial
  Oligomer
augguggaaacccacaacg

SEQ ID NO: 10639 - RNA, 19 nt, artificial
  Oligomer
uccaccugcaagacuaucg

SEQ ID NO: 10640 - RNA, 19 nt, artificial
  Oligomer
cuucaacacaucagagcuc

SEQ ID NO: 10641 - RNA, 19 nt, artificial
  Oligomer
aagauggagagaggacugc

SEQ ID NO: 10642 - RNA, 19 nt, artificial
  Oligomer
auucauggcaugaaccggc

SEQ ID NO: 10643 - RNA, 19 nt, artificial
  Oligomer
agcagggauaacacacugc

SEQ ID NO: 10644 - RNA, 19 nt, artificial
  Oligomer
ugcaagacuaucgacaugg

SEQ ID NO: 10645 - RNA, 19 nt, artificial
  Oligomer
uucaagaccacccaccuuc

SEQ ID NO: 10646 - RNA, 19 nt, artificial
  Oligomer
uaucuuuugaugucaccgg

SEQ ID NO: 10647 - RNA, 19 nt, artificial
  Oligomer
uuaaaaguggagcagcacg

SEQ ID NO: 10648 - RNA, 19 nt, artificial
  Oligomer
cucaaguuaaaaguggagc

SEQ ID NO: 10649 - RNA, 19 nt, artificial
  Oligomer
cccaucuagguuauuuccg

SEQ ID NO: 10650 - RNA, 19 nt, artificial
  Oligomer
uauugcuucagcuccacgg

SEQ ID NO: 10651 - RNA, 19 nt, artificial
  Oligomer
uuuccugcuucucauggcc

SEQ ID NO: 10652 - RNA, 19 nt, artificial
  Oligomer
ccuuuccugcuucucaugg

SEQ ID NO: 10653 - RNA, 19 nt, artificial
  Oligomer
auacagcaacaauuccugg

SEQ ID NO: 10654 - RNA, 19 nt, artificial
  Oligomer
uuccgugggauacugagac

SEQ ID NO: 10655 - RNA, 19 nt, artificial
  Oligomer
ugcacuauuccuuugcccg

SEQ ID NO: 10656 - RNA, 19 nt, artificial
  Oligomer
ugccugucugcacuauucc

SEQ ID NO: 10657 - RNA, 19 nt, artificial
  Oligomer
cuguccaacaugaucgugc

SEQ ID NO: 10658 - RNA, 19 nt, artificial
  Oligomer
accauucauggcaugaacc

SEQ ID NO: 10659 - RNA, 19 nt, artificial
  Oligomer
auguucuucaacacaucag

SEQ ID NO: 10660 - RNA, 19 nt, artificial
  Oligomer
ucugcacuauuccuuugcc

SEQ ID NO: 10661 - RNA, 19 nt, artificial
  Oligomer
uuugaugucaccggaguug

SEQ ID NO: 10662 - RNA, 19 nt, artificial
  Oligomer
uuugagacuuuuccguugc

SEQ ID NO: 10663 - RNA, 19 nt, artificial
  Oligomer
acacagcauauauauguuc

SEQ ID NO: 10664 - RNA, 19 nt, artificial
  Oligomer
uacuacgccaaggagguca

SEQ ID NO: 10665 - RNA, 19 nt, artificial
  Oligomer
acagcaacaauuccuggcg

SEQ ID NO: 10666 - RNA, 19 nt, artificial
  Oligomer
gugcuaaugguggaaaccc

SEQ ID NO: 10667 - RNA, 19 nt, artificial
  Oligomer
auuuaaggacacccgugcc

SEQ ID NO: 10668 - RNA, 19 nt, artificial
  Oligomer
uccaacaugaucgugcgcu

SEQ ID NO: 10669 - RNA, 19 nt, artificial
  Oligomer
ugagacuuuuccguugccg

SEQ ID NO: 10670 - RNA, 19 nt, artificial
  Oligomer
uucuucaacacaucagagc

SEQ ID NO: 10671 - RNA, 19 nt, artificial
  Oligomer
auugacuuccgcaaggacc

SEQ ID NO: 10672 - RNA, 19 nt, artificial
  Oligomer
uugagacuuuuccguugcc

SEQ ID NO: 10673 - RNA, 19 nt, artificial
  Oligomer
acuaucgacauggagcugg

SEQ ID NO: 10674 - RNA, 19 nt, artificial
  Oligomer
uacagcaacaauuccuggc

SEQ ID NO: 10675 - RNA, 19 nt, artificial
  Oligomer
gucugcacuauuccuuugc

SEQ ID NO: 10676 - RNA, 19 nt, artificial
  Oligomer
acucgccagagugguuauc

SEQ ID NO: 10677 - RNA, 19 nt, artificial
  Oligomer
uaccaugccaacuucugcc

SEQ ID NO: 10678 - RNA, 19 nt, artificial
  Oligomer
aucuagguuauuuccgugg

SEQ ID NO: 10679 - RNA, 19 nt, artificial
  Oligomer
uacaaccagcauaacccgg

SEQ ID NO: 10680 - RNA, 19 nt, artificial
  Oligomer
aucaacggguucacuaccg

SEQ ID NO: 10681 - RNA, 19 nt, artificial
  Oligomer
uucaacacaucagagcucc

SEQ ID NO: 10682 - RNA, 19 nt, artificial
  Oligomer
uuaucuuuugaugucaccg

SEQ ID NO: 10683 - RNA, 19 nt, artificial
  Oligomer
auccaccugcaagacuauc

SEQ ID NO: 10684 - RNA, 19 nt, artificial
  Oligomer
uugcaguguguuaucccug

SEQ ID NO: 10685 - RNA, 19 nt, artificial
  Oligomer
uuucugguacagcuccacg

SEQ ID NO: 10686 - RNA, 19 nt, artificial
  Oligomer
uuuuccucuucucccgacc

SEQ ID NO: 10687 - RNA, 19 nt, artificial
  Oligomer
uucguuguggguuuccacc

SEQ ID NO: 10688 - RNA, 19 nt, artificial
  Oligomer
uuuuuuuccucuucucccg

SEQ ID NO: 10689 - RNA, 19 nt, artificial
  Oligomer
uccacuuuuaacuugagcc

SEQ ID NO: 10690 - RNA, 19 nt, artificial
  Oligomer
uuuaacuugagccucagca

SEQ ID NO: 10691 - RNA, 19 nt, artificial
  Oligomer
uuaugcugguuguacaggg

SEQ ID NO: 10692 - RNA, 19 nt, artificial
  Oligomer
augagaagcaggaaaggcc

SEQ ID NO: 10693 - RNA, 19 nt, artificial
  Oligomer
ucuaacuacaguaguguuc

SEQ ID NO: 10694 - RNA, 19 nt, artificial
  Oligomer
uuucguuguggguuuccac

SEQ ID NO: 10695 - RNA, 19 nt, artificial
  Oligomer
uuuuuuccucuucucccga

SEQ ID NO: 10696 - RNA, 19 nt, artificial
  Oligomer
uugauguccacuugcagug

SEQ ID NO: 10697 - RNA, 19 nt, artificial
  Oligomer
ucaaaagauaaccacucug

SEQ ID NO: 10698 - RNA, 19 nt, artificial
  Oligomer
ucgauagucuugcaggugg

SEQ ID NO: 10699 - RNA, 19 nt, artificial
  Oligomer
ugcugcuccacuuuuaacu

SEQ ID NO: 10700 - RNA, 19 nt, artificial
  Oligomer
uuuuaacuugagccucagc

SEQ ID NO: 10701 - RNA, 19 nt, artificial
  Oligomer
uucaccagcuccaugucga

SEQ ID NO: 10702 - RNA, 19 nt, artificial
  Oligomer
augucgauagucuugcagg

SEQ ID NO: 10703 - RNA, 19 nt, artificial
  Oligomer
guuuuuuuccucuucuccc

SEQ ID NO: 10704 - RNA, 19 nt, artificial
  Oligomer
uuuuuccucuucucccgac

SEQ ID NO: 10705 - RNA, 19 nt, artificial
  Oligomer
uuuccucuucucccgacca

SEQ ID NO: 10706 - RNA, 19 nt, artificial
  Oligomer
uuaacuugagccucagcag

SEQ ID NO: 10707 - RNA, 19 nt, artificial
  Oligomer
uaucccacggaaauaaccu

SEQ ID NO: 10708 - RNA, 19 nt, artificial
  Oligomer
uccaggcuccaaauguagg

SEQ ID NO: 10709 - RNA, 19 nt, artificial
  Oligomer
ucugauguguugaagaaca

SEQ ID NO: 10710 - RNA, 19 nt, artificial
  Oligomer
guuuccaccauuagcacgc

SEQ ID NO: 10711 - RNA, 19 nt, artificial
  Oligomer
aguuuuuuuccucuucucc

SEQ ID NO: 10712 - RNA, 19 nt, artificial
  Oligomer
uggguggucuugaauaggg

SEQ ID NO: 10713 - RNA, 19 nt, artificial
  Oligomer
uucaugccaugaauggugg

SEQ ID NO: 10714 - RNA, 19 nt, artificial
  Oligomer
ucccacggaaauaaccuag

SEQ ID NO: 10715 - RNA, 19 nt, artificial
  Oligomer
ucguuguggguuuccacca

SEQ ID NO: 10716 - RNA, 19 nt, artificial
  Oligomer
accagcuccaugucgauag

SEQ ID NO: 10717 - RNA, 19 nt, artificial
  Oligomer
acggaaauaaccuagaugg

SEQ ID NO: 10718 - RNA, 19 nt, artificial
  Oligomer
uucuucuccguggagcuga

SEQ ID NO: 10719 - RNA, 19 nt, artificial
  Oligomer
uuguggguuuccaccauua

SEQ ID NO: 10720 - RNA, 19 nt, artificial
  Oligomer
auagauuucguuguggguu

SEQ ID NO: 10721 - RNA, 19 nt, artificial
  Oligomer
uggguuuccaccauuagca

SEQ ID NO: 10722 - RNA, 19 nt, artificial
  Oligomer
cuaacuacaguaguguucc

SEQ ID NO: 10723 - RNA, 19 nt, artificial
  Oligomer
aucugguaccagaaggugg

SEQ ID NO: 10724 - RNA, 19 nt, artificial
  Oligomer
ccucucuccaucuuuaaug

SEQ ID NO: 10725 - RNA, 19 nt, artificial
  Oligomer
uguguacucugcuugaacu

SEQ ID NO: 10726 - RNA, 19 nt, artificial
  Oligomer
aaaggaauagugcagacag

SEQ ID NO: 10727 - RNA, 19 nt, artificial
  Oligomer
aaugacacagagauccgca

SEQ ID NO: 10728 - RNA, 19 nt, artificial
  Oligomer
aucauguuggacagcugcu

SEQ ID NO: 10729 - RNA, 19 nt, artificial
  Oligomer
agucaauguacagcugccg

SEQ ID NO: 10730 - RNA, 19 nt, artificial
  Oligomer
uguauuucugguacagcuc

SEQ ID NO: 10731 - RNA, 19 nt, artificial
  Oligomer
uaugcugguuguacagggc

SEQ ID NO: 10732 - RNA, 19 nt, artificial
  Oligomer
auaguugguguccagggcu

SEQ ID NO: 10733 - RNA, 19 nt, artificial
  Oligomer
uuaucccugcugucacagg

SEQ ID NO: 10734 - RNA, 19 nt, artificial
  Oligomer
uuguugcuguauuucuggu

SEQ ID NO: 10735 - RNA, 19 nt, artificial
  Oligomer
uuuccaccauuagcacgcg

SEQ ID NO: 10736 - RNA, 19 nt, artificial
  Oligomer
uccacuugcaguguguuau

SEQ ID NO: 10737 - RNA, 19 nt, artificial
  Oligomer
ugcaguguguuaucccugc

SEQ ID NO: 10738 - RNA, 19 nt, artificial
  Oligomer
aggaauagugcagacaggc

SEQ ID NO: 10739 - RNA, 19 nt, artificial
  Oligomer
augccaugaaugguggcca

SEQ ID NO: 10740 - RNA, 19 nt, artificial
  Oligomer
aagauaaccacucuggcga

SEQ ID NO: 10741 - RNA, 19 nt, artificial
  Oligomer
aacccguugauguccacuu

SEQ ID NO: 10742 - RNA, 19 nt, artificial
  Oligomer
ugagguaucgccaggaauu

SEQ ID NO: 10743 - RNA, 19 nt, artificial
  Oligomer
uucucggagcucugaugug

SEQ ID NO: 10744 - RNA, 19 nt, artificial
  Oligomer
ucucggagcucugaugugu

SEQ ID NO: 10745 - RNA, 19 nt, artificial
  Oligomer
aauagugcagacaggcagg

SEQ ID NO: 10746 - RNA, 19 nt, artificial
  Oligomer
uugcuguacugcgugucca

SEQ ID NO: 10747 - RNA, 19 nt, artificial
  Oligomer
uggagcugaagcaauaguu

SEQ ID NO: 10748 - RNA, 19 nt, artificial
  Oligomer
ucauagauuucguuguggg

SEQ ID NO: 10749 - RNA, 19 nt, artificial
  Oligomer
aagucaauguacagcugcc

SEQ ID NO: 10750 - RNA, 19 nt, artificial
  Oligomer
caucaaaagauaaccacuc

SEQ ID NO: 10751 - RNA, 19 nt, artificial
  Oligomer
uaacuugagccucagcaga

SEQ ID NO: 10752 - RNA, 19 nt, artificial
  Oligomer
uguacucugcuugaacuug

SEQ ID NO: 10753 - RNA, 19 nt, artificial
  Oligomer
ugucucaguaucccacgga

SEQ ID NO: 10754 - RNA, 19 nt, artificial
  Oligomer
augacacagagauccgcag

SEQ ID NO: 10755 - RNA, 19 nt, artificial
  Oligomer
guguuaucccugcugucac

SEQ ID NO: 10756 - RNA, 19 nt, artificial
  Oligomer
ucgccaggaauuguugcug

SEQ ID NO: 10757 - RNA, 19 nt, artificial
  Oligomer
ugcuccacuuuuaacuuga

SEQ ID NO: 10758 - RNA, 19 nt, artificial
  Oligomer
ucugcuugaacuugucaua

SEQ ID NO: 10759 - RNA, 19 nt, artificial
  Oligomer
uugcggaagucaauguaca

SEQ ID NO: 10760 - RNA, 19 nt, artificial
  Oligomer
uggaggagaaagggucuag

SEQ ID NO: 10761 - RNA, 19 nt, artificial
  Oligomer
augaaugguggccagguca

SEQ ID NO: 10762 - RNA, 19 nt, artificial
  Oligomer
guugauguccacuugcagu

SEQ ID NO: 10763 - RNA, 19 nt, artificial
  Oligomer
uaucccugcugucacagga

SEQ ID NO: 10764 - RNA, 19 nt, artificial
  Oligomer
gugacaucaaaagauaacc

SEQ ID NO: 10765 - RNA, 19 nt, artificial
  Oligomer
aucgccaggaauuguugcu

SEQ ID NO: 10766 - RNA, 19 nt, artificial
  Oligomer
cuccaugucgauagucuug

SEQ ID NO: 10767 - RNA, 19 nt, artificial
  Oligomer
uaacuacaguaguguuccc

SEQ ID NO: 10768 - RNA, 19 nt, artificial
  Oligomer
uauuucugguacagcucca

SEQ ID NO: 10769 - RNA, 19 nt, artificial
  Oligomer
agaagguggguggucuuga

SEQ ID NO: 10770 - RNA, 19 nt, artificial
  Oligomer
acgaucauguuggacagcu

SEQ ID NO: 10771 - RNA, 19 nt, artificial
  Oligomer
uccggugacaucaaaagau

SEQ ID NO: 10772 - RNA, 19 nt, artificial
  Oligomer
ugacaucaaaagauaacca

SEQ ID NO: 10773 - RNA, 19 nt, artificial
  Oligomer
auaaccacucuggcgaguc

SEQ ID NO: 10774 - RNA, 19 nt, artificial
  Oligomer
acuuuuaacuugagccuca

SEQ ID NO: 10775 - RNA, 19 nt, artificial
  Oligomer
ugaacuugucauagauuuc

SEQ ID NO: 10776 - RNA, 19 nt, artificial
  Oligomer
auaaccuagaugggcgcga

SEQ ID NO: 10777 - RNA, 19 nt, artificial
  Oligomer
ugacacagagauccgcagu

SEQ ID NO: 10778 - RNA, 19 nt, artificial
  Oligomer
aacuugagccucagcagac

SEQ ID NO: 10779 - RNA, 19 nt, artificial
  Oligomer
augcuguguguacucugcu

SEQ ID NO: 10780 - RNA, 19 nt, artificial
  Oligomer
guucaugccaugaauggug

SEQ ID NO: 10781 - RNA, 19 nt, artificial
  Oligomer
cuugcaguguguuaucccu

SEQ ID NO: 10782 - RNA, 19 nt, artificial
  Oligomer
acuccggugacaucaaaag

SEQ ID NO: 10783 - RNA, 19 nt, artificial
  Oligomer
cuccacuuuuaacuugagc

SEQ ID NO: 10784 - RNA, 19 nt, artificial
  Oligomer
guguguacucugcuugaac

SEQ ID NO: 10785 - RNA, 19 nt, artificial
  Oligomer
ugucgauagucuugcaggu

SEQ ID NO: 10786 - RNA, 19 nt, artificial
  Oligomer
guccuugcggaagucaaug

SEQ ID NO: 10787 - RNA, 19 nt, artificial
  Oligomer
caauaguugguguccaggg

SEQ ID NO: 10788 - RNA, 19 nt, artificial
  Oligomer
guagugaacccguugaugu

SEQ ID NO: 10789 - RNA, 19 nt, artificial
  Oligomer
aguguguuaucccugcugu

SEQ ID NO: 10790 - RNA, 19 nt, artificial
  Oligomer
aucaaaagauaaccacucu

SEQ ID NO: 10791 - RNA, 19 nt, artificial
  Oligomer
aacauauauaugcugugug

SEQ ID NO: 10792 - RNA, 19 nt, artificial
  Oligomer
cucugcuugaacuugucau

SEQ ID NO: 10793 - RNA, 19 nt, artificial
  Oligomer
uguggguuuccaccauuag

SEQ ID NO: 10794 - RNA, 19 nt, artificial
  Oligomer
guggguuuccaccauuagc

SEQ ID NO: 10795 - RNA, 19 nt, artificial
  Oligomer
aaguuuuuuuccucuucuc

SEQ ID NO: 10796 - RNA, 19 nt, artificial
  Oligomer
acaucaaaagauaaccacu

SEQ ID NO: 10797 - RNA, 19 nt, artificial
  Oligomer
aaaagauaaccacucuggc

SEQ ID NO: 10798 - RNA, 19 nt, artificial
  Oligomer
cugcuugaacuugucauag

SEQ ID NO: 10799 - RNA, 19 nt, artificial
  Oligomer
agcuccaugucgauagucu

SEQ ID NO: 10800 - RNA, 19 nt, artificial
  Oligomer
aauaaccuagaugggcgcg

SEQ ID NO: 10801 - RNA, 19 nt, artificial
  Oligomer
auguuggacagcugcucca

SEQ ID NO: 10802 - RNA, 19 nt, artificial
  Oligomer
cuucucggagcucugaugu

SEQ ID NO: 10803 - RNA, 19 nt, artificial
  Oligomer
gaaauaaccuagaugggcg

SEQ ID NO: 10804 - RNA, 19 nt, artificial
  Oligomer
augccgggcaaaggaauag

SEQ ID NO: 10805 - RNA, 19 nt, artificial
  Oligomer
cccaaugacacagagaucc

SEQ ID NO: 10806 - RNA, 19 nt, artificial
  Oligomer
uccuugcggaagucaaugu

SEQ ID NO: 10807 - RNA, 19 nt, artificial
  Oligomer
acccguugauguccacuug

SEQ ID NO: 10808 - RNA, 19 nt, artificial
  Oligomer
uguuaucccugcugucaca

SEQ ID NO: 10809 - RNA, 19 nt, artificial
  Oligomer
cucaaaaguuuuuuuccuc

SEQ ID NO: 10810 - RNA, 19 nt, artificial
  Oligomer
uugaugccgggcaaaggaa

SEQ ID NO: 10811 - RNA, 19 nt, artificial
  Oligomer
uccucucuccaucuuuaau

SEQ ID NO: 10812 - RNA, 19 nt, artificial
  Oligomer
uguccaggcuccaaaugua

SEQ ID NO: 10813 - RNA, 19 nt, artificial
  Oligomer
agguggguggucuugaaua

SEQ ID NO: 10814 - RNA, 19 nt, artificial
  Oligomer
cacaacuccggugacauca

SEQ ID NO: 10815 - RNA, 19 nt, artificial
  Oligomer
gucucaaaaguuuuuuucc

SEQ ID NO: 10816 - RNA, 19 nt, artificial
  Oligomer
auagucuugcagguggaua

SEQ ID NO: 10817 - RNA, 19 nt, artificial
  Oligomer
aaggaauagugcagacagg

SEQ ID NO: 10818 - RNA, 19 nt, artificial
  Oligomer
guguccaggcuccaaaugu

SEQ ID NO: 10819 - RNA, 19 nt, artificial
  Oligomer
guggguggucuugaauagg

SEQ ID NO: 10820 - RNA, 19 nt, artificial
  Oligomer
aagcaauaguuggugucca

SEQ ID NO: 10821 - RNA, 19 nt, artificial
  Oligomer
guauuucugguacagcucc

SEQ ID NO: 10822 - RNA, 19 nt, artificial
  Oligomer
agaacauauauaugcugug

SEQ ID NO: 10823 - RNA, 19 nt, artificial
  Oligomer
guaucccacggaaauaacc

SEQ ID NO: 10824 - RNA, 19 nt, artificial
  Oligomer
aguccucucuccaucuuua

SEQ ID NO: 10825 - RNA, 19 nt, artificial
  Oligomer
guguguuaucccugcuguc

SEQ ID NO: 10826 - RNA, 19 nt, artificial
  Oligomer
aaggcgaaagcccucaauu

SEQ ID NO: 10827 - RNA, 19 nt, artificial
  Oligomer
aacuccggugacaucaaaa

SEQ ID NO: 10828 - RNA, 19 nt, artificial
  Oligomer
agcggcaacggaaaagucu

SEQ ID NO: 10829 - RNA, 19 nt, artificial
  Oligomer
cuuuuaacuugagccucag

SEQ ID NO: 10830 - RNA, 19 nt, artificial
  Oligomer
aacggaaaagucucaaaag

SEQ ID NO: 10831 - RNA, 19 nt, artificial
  Oligomer
acucugcuugaacuuguca

SEQ ID NO: 10832 - RNA, 19 nt, artificial
  Oligomer
aacuugucauagauuucgu

SEQ ID NO: 10833 - RNA, 19 nt, artificial
  Oligomer
ucucaguaucccacggaaa

SEQ ID NO: 10834 - RNA, 19 nt, artificial
  Oligomer
ucaguaucccacggaaaua

SEQ ID NO: 10835 - RNA, 19 nt, artificial
  Oligomer
guguccuuaaauacagccc

SEQ ID NO: 10836 - RNA, 19 nt, artificial
  Oligomer
cuguauuucugguacagcu

SEQ ID NO: 10837 - RNA, 19 nt, artificial
  Oligomer
ucucuccaucuuuaauggg

SEQ ID NO: 10838 - RNA, 19 nt, artificial
  Oligomer
acguaguacacgaugggca

SEQ ID NO: 10839 - RNA, 19 nt, artificial
  Oligomer
guccaggcuccaaauguag

SEQ ID NO: 10840 - RNA, 19 nt, artificial
  Oligomer
cagaaguuggcaugguagc

SEQ ID NO: 10841 - RNA, 19 nt, artificial
  Oligomer
aaguuggcaugguagcccu

SEQ ID NO: 10842 - RNA, 19 nt, artificial
  Oligomer
caugagaagcaggaaaggc

SEQ ID NO: 10843 - RNA, 19 nt, artificial
  Oligomer
auguccacuugcagugugu

SEQ ID NO: 10844 - RNA, 19 nt, artificial
  Oligomer
uugcuguauuucugguaca

SEQ ID NO: 10845 - RNA, 19 nt, artificial
  Oligomer
cacuuuuaacuugagccuc

SEQ ID NO: 10846 - RNA, 19 nt, artificial
  Oligomer
cucugauguguugaagaac

SEQ ID NO: 10847 - RNA, 19 nt, artificial
  Oligomer
ugccgggcaaaggaauagu

SEQ ID NO: 10848 - RNA, 19 nt, artificial
  Oligomer
agaaguuggcaugguagcc

SEQ ID NO: 10849 - RNA, 19 nt, artificial
  Oligomer
cguugauguccacuugcag

SEQ ID NO: 10850 - RNA, 19 nt, artificial
  Oligomer
ggagaaagggucuaggaug

SEQ ID NO: 10851 - RNA, 19 nt, artificial
  Oligomer
gcuguguguacucugcuug

SEQ ID NO: 10852 - RNA, 19 nt, artificial
  Oligomer
cacggaaauaaccuagaug

SEQ ID NO: 10853 - RNA, 19 nt, artificial
  Oligomer
aucuaacuacaguaguguu

SEQ ID NO: 10854 - RNA, 19 nt, artificial
  Oligomer
gcgaaagcccucaauuucc

SEQ ID NO: 10855 - RNA, 19 nt, artificial
  Oligomer
cuguguguacucugcuuga

SEQ ID NO: 10856 - RNA, 19 nt, artificial
  Oligomer
ugcuugaacuugucauaga

SEQ ID NO: 10857 - RNA, 19 nt, artificial
  Oligomer
gucgauagucuugcaggug

SEQ ID NO: 10858 - RNA, 19 nt, artificial
  Oligomer
ugcggaagucaauguacag

SEQ ID NO: 10859 - RNA, 19 nt, artificial
  Oligomer
agcucugauguguugaaga

SEQ ID NO: 10860 - RNA, 19 nt, artificial
  Oligomer
acuugucauagauuucguu

SEQ ID NO: 10861 - RNA, 19 nt, artificial
  Oligomer
ugucauagauuucguugug

SEQ ID NO: 10862 - RNA, 19 nt, artificial
  Oligomer
ccaaugacacagagauccg

SEQ ID NO: 10863 - RNA, 19 nt, artificial
  Oligomer
acggguguccuuaaauaca

SEQ ID NO: 10864 - RNA, 19 nt, artificial
  Oligomer
aagguggguggucuugaau

SEQ ID NO: 10865 - RNA, 19 nt, artificial
  Oligomer
cugcuccacuuuuaacuug

SEQ ID NO: 10866 - RNA, 19 nt, artificial
  Oligomer
guacucugcuugaacuugu

SEQ ID NO: 10867 - RNA, 19 nt, artificial
  Oligomer
cuugaacuugucauagauu

SEQ ID NO: 10868 - RNA, 19 nt, artificial
  Oligomer
ugaugccgggcaaaggaau

SEQ ID NO: 10869 - RNA, 19 nt, artificial
  Oligomer
gaagcaauaguuggugucc

SEQ ID NO: 10870 - RNA, 19 nt, artificial
  Oligomer
uguccacuugcaguguguu

SEQ ID NO: 10871 - RNA, 19 nt, artificial
  Oligomer
caguguguuaucccugcug

SEQ ID NO: 10872 - RNA, 19 nt, artificial
  Oligomer
ugcuguauuucugguacag

SEQ ID NO: 10873 - RNA, 19 nt, artificial
  Oligomer
acgugcugcuccacuuuua

SEQ ID NO: 10874 - RNA, 19 nt, artificial
  Oligomer
ucggagcucugauguguug

SEQ ID NO: 10875 - RNA, 19 nt, artificial
  Oligomer
caguccucucuccaucuuu

SEQ ID NO: 10876 - RNA, 19 nt, artificial
  Oligomer
cacggguguccuuaaauac

SEQ ID NO: 10877 - RNA, 19 nt, artificial
  Oligomer
ugaacccguugauguccac

SEQ ID NO: 10878 - RNA, 19 nt, artificial
  Oligomer
ugcuguguguacucugcuu

SEQ ID NO: 10879 - RNA, 19 nt, artificial
  Oligomer
acggaaaagucucaaaagu

SEQ ID NO: 10880 - RNA, 19 nt, artificial
  Oligomer
guuguggguuuccaccauu

SEQ ID NO: 10881 - RNA, 19 nt, artificial
  Oligomer
uccguggagcugaagcaau

SEQ ID NO: 10882 - RNA, 19 nt, artificial
  Oligomer
gugaacccguugaugucca

SEQ ID NO: 10883 - RNA, 19 nt, artificial
  Oligomer
gagaaagggucuaggaugc

SEQ ID NO: 10884 - RNA, 19 nt, artificial
  Oligomer
gaucuaacuacaguagugu

SEQ ID NO: 10885 - RNA, 19 nt, artificial
  Oligomer
gaacccguugauguccacu

SEQ ID NO: 10886 - RNA, 19 nt, artificial
  Oligomer
guuaucccugcugucacag

SEQ ID NO: 10887 - RNA, 19 nt, artificial
  Oligomer
ucaccagcuccaugucgau

SEQ ID NO: 10888 - RNA, 19 nt, artificial
  Oligomer
aguaucccacggaaauaac

SEQ ID NO: 10889 - RNA, 19 nt, artificial
  Oligomer
uaaccuagaugggcgcgau

SEQ ID NO: 10890 - RNA, 19 nt, artificial
  Oligomer
guuaugcugguuguacagg

SEQ ID NO: 10891 - RNA, 19 nt, artificial
  Oligomer
cuugcggaagucaauguac

SEQ ID NO: 10892 - RNA, 19 nt, artificial
  Oligomer
gagcugaagcaauaguugg

SEQ ID NO: 10893 - RNA, 19 nt, artificial
  Oligomer
guugcuguauuucugguac

SEQ ID NO: 10894 - RNA, 19 nt, artificial
  Oligomer
uguguguacucugcuugaa

SEQ ID NO: 10895 - RNA, 19 nt, artificial
  Oligomer
cucaguaucccacggaaau

SEQ ID NO: 10896 - RNA, 19 nt, artificial
  Oligomer
auagugcagacaggcagga

SEQ ID NO: 10897 - RNA, 19 nt, artificial
  Oligomer
agguccuugcggaagucaa

SEQ ID NO: 10898 - RNA, 19 nt, artificial
  Oligomer
agcaguucuucuccgugga

SEQ ID NO: 10899 - RNA, 19 nt, artificial
  Oligomer
aaaggccgguucaugccau

SEQ ID NO: 10900 - RNA, 19 nt, artificial
  Oligomer
ccgguucaugccaugaaug

SEQ ID NO: 10901 - RNA, 19 nt, artificial
  Oligomer
gaaaagucuuugcgggagg

SEQ ID NO: 10902 - RNA, 19 nt, artificial
  Oligomer
ccacuuuuaacuugagccu

SEQ ID NO: 10903 - RNA, 19 nt, artificial
  Oligomer
agcaacacggguucaggua

SEQ ID NO: 10904 - RNA, 19 nt, artificial
  Oligomer
gcaauaguugguguccagg

SEQ ID NO: 10905 - RNA, 19 nt, artificial
  Oligomer
ucaugccaugaaugguggc

SEQ ID NO: 10906 - RNA, 19 nt, artificial
  Oligomer
gacaucaaaagauaaccac

SEQ ID NO: 10907 - RNA, 19 nt, artificial
  Oligomer
ugauguguugaagaacaua

SEQ ID NO: 10908 - RNA, 19 nt, artificial
  Oligomer
gauguguugaagaacauau

SEQ ID NO: 10909 - RNA, 19 nt, artificial
  Oligomer
gaagaacauauauaugcug

SEQ ID NO: 10910 - RNA, 19 nt, artificial
  Oligomer
ggaaauaaccuagaugggc

SEQ ID NO: 10911 - RNA, 19 nt, artificial
  Oligomer
cggguguccuuaaauacag

SEQ ID NO: 10912 - RNA, 19 nt, artificial
  Oligomer
gguguccuuaaauacagcc

SEQ ID NO: 10913 - RNA, 19 nt, artificial
  Oligomer
cgcacgaucauguuggaca

SEQ ID NO: 10914 - RNA, 19 nt, artificial
  Oligomer
guggagcugaagcaauagu

SEQ ID NO: 10915 - RNA, 19 nt, artificial
  Oligomer
aggagaaagggucuaggau

SEQ ID NO: 10916 - RNA, 19 nt, artificial
  Oligomer
cuccggugacaucaaaaga

SEQ ID NO: 10917 - RNA, 19 nt, artificial
  Oligomer
gcuguauuucugguacagc

SEQ ID NO: 10918 - RNA, 19 nt, artificial
  Oligomer
guguacucugcuugaacuu

SEQ ID NO: 10919 - RNA, 19 nt, artificial
  Oligomer
gucauagauuucguugugg

SEQ ID NO: 10920 - RNA, 19 nt, artificial
  Oligomer
cucucuccaucuuuaaugg

SEQ ID NO: 10921 - RNA, 19 nt, artificial
  Oligomer
gcggaagucaauguacagc

SEQ ID NO: 10922 - RNA, 19 nt, artificial
  Oligomer
cugagguaucgccaggaau

SEQ ID NO: 10923 - RNA, 19 nt, artificial
  Oligomer
caacggaaaagucucaaaa

SEQ ID NO: 10924 - RNA, 19 nt, artificial
  Oligomer
agauuucguuguggguuuc

SEQ ID NO: 10925 - RNA, 19 nt, artificial
  Oligomer
aucccacggaaauaaccua

SEQ ID NO: 10926 - RNA, 19 nt, artificial
  Oligomer
cgaucauguuggacagcug

SEQ ID NO: 10927 - RNA, 19 nt, artificial
  Oligomer
cggaagucaauguacagcu

SEQ ID NO: 10928 - RNA, 19 nt, artificial
  Oligomer
ugauguccacuugcagugu

SEQ ID NO: 10929 - RNA, 19 nt, artificial
  Oligomer
aaaagucuuugcgggaggc

SEQ ID NO: 10930 - RNA, 19 nt, artificial
  Oligomer
cacgugcugcuccacuuuu

SEQ ID NO: 10931 - RNA, 19 nt, artificial
  Oligomer
cucggagcucugauguguu

SEQ ID NO: 10932 - RNA, 19 nt, artificial
  Oligomer
accuccuuggcguaguagu

SEQ ID NO: 10933 - RNA, 19 nt, artificial
  Oligomer
cggguuaugcugguuguac

SEQ ID NO: 10934 - RNA, 19 nt, artificial
  Oligomer
gcagaaguuggcaugguag

SEQ ID NO: 10935 - RNA, 19 nt, artificial
  Oligomer
gagguaucgccaggaauug

SEQ ID NO: 10936 - RNA, 19 nt, artificial
  Oligomer
cagcuccaugucgauaguc

SEQ ID NO: 10937 - RNA, 19 nt, artificial
  Oligomer
gcuccaugucgauagucuu

SEQ ID NO: 10938 - RNA, 19 nt, artificial
  Oligomer
cguggagcugaagcaauag

SEQ ID NO: 10939 - RNA, 19 nt, artificial
  Oligomer
guccacuugcaguguguua

SEQ ID NO: 10940 - RNA, 19 nt, artificial
  Oligomer
cgaaagcccucaauuuccc

SEQ ID NO: 10941 - RNA, 19 nt, artificial
  Oligomer
acaacuccggugacaucaa

SEQ ID NO: 10942 - RNA, 19 nt, artificial
  Oligomer
aggaauuguugcuguauuu

SEQ ID NO: 10943 - RNA, 19 nt, artificial
  Oligomer
gaucugguaccagaaggug

SEQ ID NO: 10944 - RNA, 19 nt, artificial
  Oligomer
aggagcgcacgaucauguu

SEQ ID NO: 10945 - RNA, 19 nt, artificial
  Oligomer
accuugcuguacugcgugu

SEQ ID NO: 10946 - RNA, 19 nt, artificial
  Oligomer
aguuggcaugguagcccuu

SEQ ID NO: 10947 - RNA, 19 nt, artificial
  Oligomer
agcugaagcaauaguuggu

SEQ ID NO: 10948 - RNA, 19 nt, artificial
  Oligomer
cugaagcaauaguuggugu

SEQ ID NO: 10949 - RNA, 19 nt, artificial
  Oligomer
agcaauaguugguguccag

SEQ ID NO: 10950 - RNA, 19 nt, artificial
  Oligomer
ccguugauguccacuugca

SEQ ID NO: 10951 - RNA, 19 nt, artificial
  Oligomer
ggcgaaagcccucaauuuc

SEQ ID NO: 10952 - RNA, 19 nt, artificial
  Oligomer
cggaaaagucucaaaaguu

SEQ ID NO: 10953 - RNA, 19 nt, artificial
  Oligomer
ggagcugaagcaauaguug

SEQ ID NO: 10954 - RNA, 19 nt, artificial
  Oligomer
gcugaagcaauaguuggug

SEQ ID NO: 10955 - RNA, 19 nt, artificial
  Oligomer
gauguccacuugcagugug

SEQ ID NO: 10956 - RNA, 19 nt, artificial
  Oligomer
gugcugcuccacuuuuaac

SEQ ID NO: 10957 - RNA, 19 nt, artificial
  Oligomer
acauauauaugcugugugu

SEQ ID NO: 10958 - RNA, 19 nt, artificial
  Oligomer
gguuuccaccauuagcacg

SEQ ID NO: 10959 - RNA, 19 nt, artificial
  Oligomer
caccagcuccaugucgaua

SEQ ID NO: 10960 - RNA, 19 nt, artificial
  Oligomer
guccucucuccaucuuuaa

SEQ ID NO: 10961 - RNA, 19 nt, artificial
  Oligomer
aguucuucuccguggagcu

SEQ ID NO: 10962 - RNA, 19 nt, artificial
  Oligomer
cuggaggagaaagggucua

SEQ ID NO: 10963 - RNA, 19 nt, artificial
  Oligomer
aggcgaaagcccucaauuu

SEQ ID NO: 10964 - RNA, 19 nt, artificial
  Oligomer
ggguuaugcugguuguaca

SEQ ID NO: 10965 - RNA, 19 nt, artificial
  Oligomer
gguggguggucuugaauag

SEQ ID NO: 10966 - RNA, 19 nt, artificial
  Oligomer
cgguucaugccaugaaugg

SEQ ID NO: 10967 - RNA, 19 nt, artificial
  Oligomer
cacuugcaguguguuaucc

SEQ ID NO: 10968 - RNA, 19 nt, artificial
  Oligomer
cuaaggcgaaagcccucaa

SEQ ID NO: 10969 - RNA, 19 nt, artificial
  Oligomer
caguaucccacggaaauaa

SEQ ID NO: 10970 - RNA, 19 nt, artificial
  Oligomer
gguagugaacccguugaug

SEQ ID NO: 10971 - RNA, 19 nt, artificial
  Oligomer
gggcaaaggaauagugcag

SEQ ID NO: 10972 - RNA, 19 nt, artificial
  Oligomer
ccuugcggaagucaaugua

SEQ ID NO: 10973 - RNA, 19 nt, artificial
  Oligomer
ucuucuccguggagcugaa

SEQ ID NO: 10974 - RNA, 19 nt, artificial
  Oligomer
gcugcuccacuuuuaacuu

SEQ ID NO: 10975 - RNA, 19 nt, artificial
  Oligomer
gucuugcagguggauaguc

SEQ ID NO: 10976 - RNA, 19 nt, artificial
  Oligomer
gguaucgccaggaauuguu

SEQ ID NO: 10977 - RNA, 19 nt, artificial
  Oligomer
caggaauuguugcuguauu

SEQ ID NO: 10978 - RNA, 19 nt, artificial
  Oligomer
ggaaaagucucaaaaguuu

SEQ ID NO: 10979 - RNA, 19 nt, artificial
  Oligomer
uggccaugagaagcaggaa

SEQ ID NO: 10980 - RNA, 19 nt, artificial
  Oligomer
ggaaaagucuuugcgggag

SEQ ID NO: 10981 - RNA, 19 nt, artificial
  Oligomer
agguaucgccaggaauugu

SEQ ID NO: 10982 - RNA, 19 nt, artificial
  Oligomer
cacgaucauguuggacagc

SEQ ID NO: 10983 - RNA, 19 nt, artificial
  Oligomer
gcuugaacuugucauagau

SEQ ID NO: 10984 - RNA, 19 nt, artificial
  Oligomer
cauagauuucguugugggu

SEQ ID NO: 10985 - RNA, 19 nt, artificial
  Oligomer
cccacggaaauaaccuaga

SEQ ID NO: 10986 - RNA, 19 nt, artificial
  Oligomer
cgaucugguaccagaaggu

SEQ ID NO: 10987 - RNA, 19 nt, artificial
  Oligomer
gccaugagaagcaggaaag

SEQ ID NO: 10988 - RNA, 19 nt, artificial
  Oligomer
ccacuugcaguguguuauc

SEQ ID NO: 10989 - RNA, 19 nt, artificial
  Oligomer
ggguguccuuaaauacagc

SEQ ID NO: 10990 - RNA, 19 nt, artificial
  Oligomer
gaggagaaagggucuagga

SEQ ID NO: 10991 - RNA, 19 nt, artificial
  Oligomer
ggugacaucaaaagauaac

SEQ ID NO: 10992 - RNA, 19 nt, artificial
  Oligomer
cggagcucugauguguuga

SEQ ID NO: 10993 - RNA, 19 nt, artificial
  Oligomer
gaugccgggcaaaggaaua

SEQ ID NO: 10994 - RNA, 19 nt, artificial
  Oligomer
gcacggguguccuuaaaua

SEQ ID NO: 10995 - RNA, 19 nt, artificial
  Oligomer
gguuaugcugguuguacag

SEQ ID NO: 10996 - RNA, 19 nt, artificial
  Oligomer
gggaaaagucuuugcggga

SEQ ID NO: 10997 - RNA, 19 nt, artificial
  Oligomer
cauauauaugcugugugua

SEQ ID NO: 10998 - RNA, 19 nt, artificial
  Oligomer
cgcccaaugacacagagau

SEQ ID NO: 10999 - RNA, 19 nt, artificial
  Oligomer
aggcagaaguuggcauggu

SEQ ID NO: 11000 - RNA, 19 nt, artificial
  Oligomer
agucuugcagguggauagu

SEQ ID NO: 11001 - RNA, 19 nt, artificial
  Oligomer
gcccaaugacacagagauc

SEQ ID NO: 11002 - RNA, 19 nt, artificial
  Oligomer
ggaagucaauguacagcug

SEQ ID NO: 11003 - RNA, 19 nt, artificial
  Oligomer
agauaaccacucuggcgag

SEQ ID NO: 11004 - RNA, 19 nt, artificial
  Oligomer
cguuguggguuuccaccau

SEQ ID NO: 11005 - RNA, 19 nt, artificial
  Oligomer
cgauagucuugcaggugga

SEQ ID NO: 11006 - RNA, 19 nt, artificial
  Oligomer
gagcucugauguguugaag

SEQ ID NO: 11007 - RNA, 19 nt, artificial
  Oligomer
gcaguccucucuccaucuu

SEQ ID NO: 11008 - RNA, 19 nt, artificial
  Oligomer
gccgguucaugccaugaau

SEQ ID NO: 11009 - RNA, 19 nt, artificial
  Oligomer
gcaguguguuaucccugcu

SEQ ID NO: 11010 - RNA, 19 nt, artificial
  Oligomer
ccaugucgauagucuugca

SEQ ID NO: 11011 - RNA, 19 nt, artificial
  Oligomer
gaagguggguggucuugaa

SEQ ID NO: 11012 - RNA, 19 nt, artificial
  Oligomer
ccggugacaucaaaagaua

SEQ ID NO: 11013 - RNA, 19 nt, artificial
  Oligomer
cgugcugcuccacuuuuaa

SEQ ID NO: 11014 - RNA, 19 nt, artificial
  Oligomer
gcuccacuuuuaacuugag

SEQ ID NO: 11015 - RNA, 19 nt, artificial
  Oligomer
cggaaauaaccuagauggg

SEQ ID NO: 11016 - RNA, 19 nt, artificial
  Oligomer
ccguggagcugaagcaaua

SEQ ID NO: 11017 - RNA, 19 nt, artificial
  Oligomer
ggccaugagaagcaggaaa

SEQ ID NO: 11018 - RNA, 19 nt, artificial
  Oligomer
ccaugagaagcaggaaagg

SEQ ID NO: 11019 - RNA, 19 nt, artificial
  Oligomer
ccaggaauuguugcuguau

SEQ ID NO: 11020 - RNA, 19 nt, artificial
  Oligomer
gucucaguaucccacggaa

SEQ ID NO: 11021 - RNA, 19 nt, artificial
  Oligomer
cgggcaaaggaauagugca

SEQ ID NO: 11022 - RNA, 19 nt, artificial
  Oligomer
ggaauagugcagacaggca

SEQ ID NO: 11023 - RNA, 19 nt, artificial
  Oligomer
gcacgaucauguuggacag

SEQ ID NO: 11024 - RNA, 19 nt, artificial
  Oligomer
gguucaugccaugaauggu

SEQ ID NO: 11025 - RNA, 19 nt, artificial
  Oligomer
cugauguguugaagaacau

SEQ ID NO: 11026 - RNA, 19 nt, artificial
  Oligomer
ggcaaaggaauagugcaga

SEQ ID NO: 11027 - RNA, 19 nt, artificial
  Oligomer
caacuccggugacaucaaa

SEQ ID NO: 11028 - RNA, 19 nt, artificial
  Oligomer
gcaacggaaaagucucaaa

SEQ ID NO: 11029 - RNA, 19 nt, artificial
  Oligomer
gaacauauauaugcugugu

SEQ ID NO: 11030 - RNA, 19 nt, artificial
  Oligomer
ugaccuccuuggcguagua

SEQ ID NO: 11031 - RNA, 19 nt, artificial
  Oligomer
cgccaggaauuguugcugu

SEQ ID NO: 11032 - RNA, 19 nt, artificial
  Oligomer
ggguuuccaccauuagcac

SEQ ID NO: 11033 - RNA, 19 nt, artificial
  Oligomer
ggcacggguguccuuaaau

SEQ ID NO: 11034 - RNA, 19 nt, artificial
  Oligomer
agcgcacgaucauguugga

SEQ ID NO: 11035 - RNA, 19 nt, artificial
  Oligomer
cggcaacggaaaagucuca

SEQ ID NO: 11036 - RNA, 19 nt, artificial
  Oligomer
gcucugauguguugaagaa

SEQ ID NO: 11037 - RNA, 19 nt, artificial
  Oligomer
gguccuugcggaagucaau

SEQ ID NO: 11038 - RNA, 19 nt, artificial
  Oligomer
ggcaacggaaaagucucaa

SEQ ID NO: 11039 - RNA, 19 nt, artificial
  Oligomer
ccagcuccaugucgauagu

SEQ ID NO: 11040 - RNA, 19 nt, artificial
  Oligomer
gccaggaauuguugcugua

SEQ ID NO: 11041 - RNA, 19 nt, artificial
  Oligomer
gcaaaggaauagugcagac

SEQ ID NO: 11042 - RNA, 19 nt, artificial
  Oligomer
gauaaccacucuggcgagu

SEQ ID NO: 11043 - RNA, 19 nt, artificial
  Oligomer
ggcagaaguuggcauggua

SEQ ID NO: 11044 - RNA, 19 nt, artificial
  Oligomer
ccacggaaauaaccuagau

SEQ ID NO: 11045 - RNA, 19 nt, artificial
  Oligomer
ccggguuaugcugguugua

SEQ ID NO: 11046 - RNA, 19 nt, artificial
  Oligomer
cgguagugaacccguugau

SEQ ID NO: 11047 - RNA, 19 nt, artificial
  Oligomer
ggagcucugauguguugaa

SEQ ID NO: 11048 - RNA, 19 nt, artificial
  Oligomer
cggugacaucaaaagauaa

SEQ ID NO: 11049 - RNA, 19 nt, artificial
  Oligomer
gauagucuugcagguggau

SEQ ID NO: 11050 - RNA, 19 nt, artificial
  Oligomer
ccaauacugacccucuuua

SEQ ID NO: 11051 - RNA, 19 nt, artificial
  Oligomer
ccuucuuaaagccuuauuu

SEQ ID NO: 11052 - RNA, 19 nt, artificial
  Oligomer
ggagauuggugcuguaaaa

SEQ ID NO: 11053 - RNA, 19 nt, artificial
  Oligomer
cccuauccuauccgcaaac

SEQ ID NO: 11054 - RNA, 19 nt, artificial
  Oligomer
gggcauuuaauucaucuuu

SEQ ID NO: 11055 - RNA, 19 nt, artificial
  Oligomer
cgaguuuucugaccagcuu

SEQ ID NO: 11056 - RNA, 19 nt, artificial
  Oligomer
ggaguguuuuuacauugau

SEQ ID NO: 11057 - RNA, 19 nt, artificial
  Oligomer
gcagaauuguggaguguuu

SEQ ID NO: 11058 - RNA, 19 nt, artificial
  Oligomer
gguguaaaaaucauguguu

SEQ ID NO: 11059 - RNA, 19 nt, artificial
  Oligomer
gaacugcuauuuccucuaa

SEQ ID NO: 11060 - RNA, 19 nt, artificial
  Oligomer
gggaacuaaacuugaucuu

SEQ ID NO: 11061 - RNA, 19 nt, artificial
  Oligomer
accaauacugacccucuuu

SEQ ID NO: 11062 - RNA, 19 nt, artificial
  Oligomer
ugauuucauagcgaguuuu

SEQ ID NO: 11063 - RNA, 19 nt, artificial
  Oligomer
gugauuucauagcgaguuu

SEQ ID NO: 11064 - RNA, 19 nt, artificial
  Oligomer
guaguucucagaugcguaa

SEQ ID NO: 11065 - RNA, 19 nt, artificial
  Oligomer
ccuauccuauccgcaaaca

SEQ ID NO: 11066 - RNA, 19 nt, artificial
  Oligomer
cgcuuugccuauugauguu

SEQ ID NO: 11067 - RNA, 19 nt, artificial
  Oligomer
cgauuaguaaaagugcuuu

SEQ ID NO: 11068 - RNA, 19 nt, artificial
  Oligomer
ccuucugacugagcaauau

SEQ ID NO: 11069 - RNA, 19 nt, artificial
  Oligomer
cccuucugacugagcaaua

SEQ ID NO: 11070 - RNA, 19 nt, artificial
  Oligomer
ggaucagucuuugugauuu

SEQ ID NO: 11071 - RNA, 19 nt, artificial
  Oligomer
gccuauugauguuccuuug

SEQ ID NO: 11072 - RNA, 19 nt, artificial
  Oligomer
ugccuauugauguuccuuu

SEQ ID NO: 11073 - RNA, 19 nt, artificial
  Oligomer
caguguuugacgaagcgau

SEQ ID NO: 11074 - RNA, 19 nt, artificial
  Oligomer
guguaaaaaucauguguug

SEQ ID NO: 11075 - RNA, 19 nt, artificial
  Oligomer
gcuuuuccuuucucuuaca

SEQ ID NO: 11076 - RNA, 19 nt, artificial
  Oligomer
ggaaauguuuucuuaagcu

SEQ ID NO: 11077 - RNA, 19 nt, artificial
  Oligomer
agaugaugaaagaaagguu

SEQ ID NO: 11078 - RNA, 19 nt, artificial
  Oligomer
caguagaugaugaaagaaa

SEQ ID NO: 11079 - RNA, 19 nt, artificial
  Oligomer
gcaguagaugaugaaagaa

SEQ ID NO: 11080 - RNA, 19 nt, artificial
  Oligomer
acauuguacaaggaaugaa

SEQ ID NO: 11081 - RNA, 19 nt, artificial
  Oligomer
agaacugcuauuuccucua

SEQ ID NO: 11082 - RNA, 19 nt, artificial
  Oligomer
cagucuuugugauuucaua

SEQ ID NO: 11083 - RNA, 19 nt, artificial
  Oligomer
cagacucacauucuauuaa

SEQ ID NO: 11084 - RNA, 19 nt, artificial
  Oligomer
agauuggugcuguaaaaua

SEQ ID NO: 11085 - RNA, 19 nt, artificial
  Oligomer
gccacuacaacagaauuuu

SEQ ID NO: 11086 - RNA, 19 nt, artificial
  Oligomer
gguucuguaaacugugcua

SEQ ID NO: 11087 - RNA, 19 nt, artificial
  Oligomer
gggucugugagguucugua

SEQ ID NO: 11088 - RNA, 19 nt, artificial
  Oligomer
guaacuagguguaaaaauc

SEQ ID NO: 11089 - RNA, 19 nt, artificial
  Oligomer
ugggcauuuaauucaucuu

SEQ ID NO: 11090 - RNA, 19 nt, artificial
  Oligomer
gguauuaucaggaaauguu

SEQ ID NO: 11091 - RNA, 19 nt, artificial
  Oligomer
agguugguauuaucaggaa

SEQ ID NO: 11092 - RNA, 19 nt, artificial
  Oligomer
guacaaggaaugaaagugu

SEQ ID NO: 11093 - RNA, 19 nt, artificial
  Oligomer
aacugcuauuuccucuaau

SEQ ID NO: 11094 - RNA, 19 nt, artificial
  Oligomer
ccuauguaguucucagaug

SEQ ID NO: 11095 - RNA, 19 nt, artificial
  Oligomer
gauuaagaguugccaaaau

SEQ ID NO: 11096 - RNA, 19 nt, artificial
  Oligomer
uccugcaucauuugaaaau

SEQ ID NO: 11097 - RNA, 19 nt, artificial
  Oligomer
uaauuugcuuuucccuugu

SEQ ID NO: 11098 - RNA, 19 nt, artificial
  Oligomer
gaauuguggaguguuuuua

SEQ ID NO: 11099 - RNA, 19 nt, artificial
  Oligomer
ccacuacaacagaauuuuu

SEQ ID NO: 11100 - RNA, 19 nt, artificial
  Oligomer
cugacgauguucuguacaa

SEQ ID NO: 11101 - RNA, 19 nt, artificial
  Oligomer
agguguaaaaaucaugugu

SEQ ID NO: 11102 - RNA, 19 nt, artificial
  Oligomer
cuagguguaaaaaucaugu

SEQ ID NO: 11103 - RNA, 19 nt, artificial
  Oligomer
ugcuuuccuuaguuuucua

SEQ ID NO: 11104 - RNA, 19 nt, artificial
  Oligomer
agcuuuuccuuucucuuac

SEQ ID NO: 11105 - RNA, 19 nt, artificial
  Oligomer
gguugguauuaucaggaaa

SEQ ID NO: 11106 - RNA, 19 nt, artificial
  Oligomer
gaaagaaagguugguauua

SEQ ID NO: 11107 - RNA, 19 nt, artificial
  Oligomer
gucaaaugcaguagaugau

SEQ ID NO: 11108 - RNA, 19 nt, artificial
  Oligomer
ugcuauuuccucuaaugaa

SEQ ID NO: 11109 - RNA, 19 nt, artificial
  Oligomer
ucagucuuugugauuucau

SEQ ID NO: 11110 - RNA, 19 nt, artificial
  Oligomer
cuucugaacuacacugcau

SEQ ID NO: 11111 - RNA, 19 nt, artificial
  Oligomer
accauuuuuugaaccaauc

SEQ ID NO: 11112 - RNA, 19 nt, artificial
  Oligomer
agacaguguuugacgaagc

SEQ ID NO: 11113 - RNA, 19 nt, artificial
  Oligomer
aggagauuggugcuguaaa

SEQ ID NO: 11114 - RNA, 19 nt, artificial
  Oligomer
gugcugacgauguucugua

SEQ ID NO: 11115 - RNA, 19 nt, artificial
  Oligomer
ccuuaguuuucuaguaacu

SEQ ID NO: 11116 - RNA, 19 nt, artificial
  Oligomer
ucgauuaguaaaagugcuu

SEQ ID NO: 11117 - RNA, 19 nt, artificial
  Oligomer
caauaugccuccuuguauu

SEQ ID NO: 11118 - RNA, 19 nt, artificial
  Oligomer
gcaauaugccuccuuguau

SEQ ID NO: 11119 - RNA, 19 nt, artificial
  Oligomer
guugguauuaucaggaaau

SEQ ID NO: 11120 - RNA, 19 nt, artificial
  Oligomer
ugaaagaaagguugguauu

SEQ ID NO: 11121 - RNA, 19 nt, artificial
  Oligomer
ugcaguagaugaugaaaga

SEQ ID NO: 11122 - RNA, 19 nt, artificial
  Oligomer
cauuguacaaggaaugaaa

SEQ ID NO: 11123 - RNA, 19 nt, artificial
  Oligomer
acugcuauuuccucuaaug

SEQ ID NO: 11124 - RNA, 19 nt, artificial
  Oligomer
gcggagauuuugaacagaa

SEQ ID NO: 11125 - RNA, 19 nt, artificial
  Oligomer
ugugauuucauagcgaguu

SEQ ID NO: 11126 - RNA, 19 nt, artificial
  Oligomer
uccuauguaguucucagau

SEQ ID NO: 11127 - RNA, 19 nt, artificial
  Oligomer
cuccuauguaguucucaga

SEQ ID NO: 11128 - RNA, 19 nt, artificial
  Oligomer
aaaaugacaagccuucuua

SEQ ID NO: 11129 - RNA, 19 nt, artificial
  Oligomer
ccaaucaguaauuuuaagg

SEQ ID NO: 11130 - RNA, 19 nt, artificial
  Oligomer
gagauuggugcuguaaaau

SEQ ID NO: 11131 - RNA, 19 nt, artificial
  Oligomer
ccuugugaguccugcauca

SEQ ID NO: 11132 - RNA, 19 nt, artificial
  Oligomer
agaauuguggaguguuuuu

SEQ ID NO: 11133 - RNA, 19 nt, artificial
  Oligomer
agccacuacaacagaauuu

SEQ ID NO: 11134 - RNA, 19 nt, artificial
  Oligomer
ucagccacuacaacagaau

SEQ ID NO: 11135 - RNA, 19 nt, artificial
  Oligomer
cugugagguucuguaaacu

SEQ ID NO: 11136 - RNA, 19 nt, artificial
  Oligomer
uccuuaguuuucuaguaac

SEQ ID NO: 11137 - RNA, 19 nt, artificial
  Oligomer
caggaaauguuuucuuaag

SEQ ID NO: 11138 - RNA, 19 nt, artificial
  Oligomer
cuacauuguacaaggaaug

SEQ ID NO: 11139 - RNA, 19 nt, artificial
  Oligomer
cugcuauuuccucuaauga

SEQ ID NO: 11140 - RNA, 19 nt, artificial
  Oligomer
aguuuucugaccagcuuuu

SEQ ID NO: 11141 - RNA, 19 nt, artificial
  Oligomer
cacugaacuuugcaaagac

SEQ ID NO: 11142 - RNA, 19 nt, artificial
  Oligomer
uaaaaugacaagccuucuu

SEQ ID NO: 11143 - RNA, 19 nt, artificial
  Oligomer
uaaggagauuggugcugua

SEQ ID NO: 11144 - RNA, 19 nt, artificial
  Oligomer
ccauggcuaaggagauugg

SEQ ID NO: 11145 - RNA, 19 nt, artificial
  Oligomer
ugggaacuaaacuugaucu

SEQ ID NO: 11146 - RNA, 19 nt, artificial
  Oligomer
gugggaacuaaacuugauc

SEQ ID NO: 11147 - RNA, 19 nt, artificial
  Oligomer
gaguccugcaucauuugaa

SEQ ID NO: 11148 - RNA, 19 nt, artificial
  Oligomer
uguuuugcauguaugacuu

SEQ ID NO: 11149 - RNA, 19 nt, artificial
  Oligomer
uggaguguuuuuacauuga

SEQ ID NO: 11150 - RNA, 19 nt, artificial
  Oligomer
cuagugcugacgauguucu

SEQ ID NO: 11151 - RNA, 19 nt, artificial
  Oligomer
ucugugagguucuguaaac

SEQ ID NO: 11152 - RNA, 19 nt, artificial
  Oligomer
gucugugagguucuguaaa

SEQ ID NO: 11153 - RNA, 19 nt, artificial
  Oligomer
ggucugugagguucuguaa

SEQ ID NO: 11154 - RNA, 19 nt, artificial
  Oligomer
gcuuugccuauugauguuc

SEQ ID NO: 11155 - RNA, 19 nt, artificial
  Oligomer
ucuuaagcuuuuccuuucu

SEQ ID NO: 11156 - RNA, 19 nt, artificial
  Oligomer
caaaugcaguagaugauga

SEQ ID NO: 11157 - RNA, 19 nt, artificial
  Oligomer
acacuacauuguacaagga

SEQ ID NO: 11158 - RNA, 19 nt, artificial
  Oligomer
gaguuuucugaccagcuuu

SEQ ID NO: 11159 - RNA, 19 nt, artificial
  Oligomer
gacauaacauuguacugua

SEQ ID NO: 11160 - RNA, 19 nt, artificial
  Oligomer
cgacauaacauuguacugu

SEQ ID NO: 11161 - RNA, 19 nt, artificial
  Oligomer
cccgacauaacauuguacu

SEQ ID NO: 11162 - RNA, 19 nt, artificial
  Oligomer
gcucuccuauguaguucuc

SEQ ID NO: 11163 - RNA, 19 nt, artificial
  Oligomer
ugaacuacacugcauuguu

SEQ ID NO: 11164 - RNA, 19 nt, artificial
  Oligomer
uucugaacuacacugcauu

SEQ ID NO: 11165 - RNA, 19 nt, artificial
  Oligomer
ccuaaaaugacaagccuuc

SEQ ID NO: 11166 - RNA, 19 nt, artificial
  Oligomer
ggaagagaaaaugccugcu

SEQ ID NO: 11167 - RNA, 19 nt, artificial
  Oligomer
gaguguuuuuacauugauc

SEQ ID NO: 11168 - RNA, 19 nt, artificial
  Oligomer
guggaguguuuuuacauug

SEQ ID NO: 11169 - RNA, 19 nt, artificial
  Oligomer
uguggaguguuuuuacauu

SEQ ID NO: 11170 - RNA, 19 nt, artificial
  Oligomer
cagaauuguggaguguuuu

SEQ ID NO: 11171 - RNA, 19 nt, artificial
  Oligomer
ugcugacgauguucuguac

SEQ ID NO: 11172 - RNA, 19 nt, artificial
  Oligomer
agguucuguaaacugugcu

SEQ ID NO: 11173 - RNA, 19 nt, artificial
  Oligomer
gugagguucuguaaacugu

SEQ ID NO: 11174 - RNA, 19 nt, artificial
  Oligomer
cuauugauguuccuuuggg

SEQ ID NO: 11175 - RNA, 19 nt, artificial
  Oligomer
gcuuuccuuaguuuucuag

SEQ ID NO: 11176 - RNA, 19 nt, artificial
  Oligomer
gugcuuuccuuaguuuucu

SEQ ID NO: 11177 - RNA, 19 nt, artificial
  Oligomer
gucgauuaguaaaagugcu

SEQ ID NO: 11178 - RNA, 19 nt, artificial
  Oligomer
cuuaagcuuuuccuuucuc

SEQ ID NO: 11179 - RNA, 19 nt, artificial
  Oligomer
augaaagaaagguugguau

SEQ ID NO: 11180 - RNA, 19 nt, artificial
  Oligomer
aaaugcaguagaugaugaa

SEQ ID NO: 11181 - RNA, 19 nt, artificial
  Oligomer
acuacauuguacaaggaau

SEQ ID NO: 11182 - RNA, 19 nt, artificial
  Oligomer
ugugugaucaaaggacaaa

SEQ ID NO: 11183 - RNA, 19 nt, artificial
  Oligomer
gaucagucuuugugauuuc

SEQ ID NO: 11184 - RNA, 19 nt, artificial
  Oligomer
augaagcguugccauugaa

SEQ ID NO: 11185 - RNA, 19 nt, artificial
  Oligomer
gaacuuugcaaagaccuuc

SEQ ID NO: 11186 - RNA, 19 nt, artificial
  Oligomer
gaacuacacugcauuguug

SEQ ID NO: 11187 - RNA, 19 nt, artificial
  Oligomer
cugaacuacacugcauugu

SEQ ID NO: 11188 - RNA, 19 nt, artificial
  Oligomer
gccugcuguuguaaauguc

SEQ ID NO: 11189 - RNA, 19 nt, artificial
  Oligomer
cuaaggagauuggugcugu

SEQ ID NO: 11190 - RNA, 19 nt, artificial
  Oligomer
uaaacuugaucuuagggau

SEQ ID NO: 11191 - RNA, 19 nt, artificial
  Oligomer
guccugcaucauuugaaaa

SEQ ID NO: 11192 - RNA, 19 nt, artificial
  Oligomer
ccuuugggucugugagguu

SEQ ID NO: 11193 - RNA, 19 nt, artificial
  Oligomer
guagucgcuuugccuauug

SEQ ID NO: 11194 - RNA, 19 nt, artificial
  Oligomer
aucauguguugcagcuuua

SEQ ID NO: 11195 - RNA, 19 nt, artificial
  Oligomer
uugguauuaucaggaaaug

SEQ ID NO: 11196 - RNA, 19 nt, artificial
  Oligomer
gaugaaagaaagguuggua

SEQ ID NO: 11197 - RNA, 19 nt, artificial
  Oligomer
ugaugaaagaaagguuggu

SEQ ID NO: 11198 - RNA, 19 nt, artificial
  Oligomer
cacuacauuguacaaggaa

SEQ ID NO: 11199 - RNA, 19 nt, artificial
  Oligomer
gugugugaucaaaggacaa

SEQ ID NO: 11200 - RNA, 19 nt, artificial
  Oligomer
cggagauuuugaacagaac

SEQ ID NO: 11201 - RNA, 19 nt, artificial
  Oligomer
uggaucagucuuugugauu

SEQ ID NO: 11202 - RNA, 19 nt, artificial
  Oligomer
cuguaauggagugagcgua

SEQ ID NO: 11203 - RNA, 19 nt, artificial
  Oligomer
ugaguuagcagcacguguu

SEQ ID NO: 11204 - RNA, 19 nt, artificial
  Oligomer
guaaaacuugccuacugau

SEQ ID NO: 11205 - RNA, 19 nt, artificial
  Oligomer
ccuuauuuuucaaaagcgc

SEQ ID NO: 11206 - RNA, 19 nt, artificial
  Oligomer
ugccugcuguuguaaaugu

SEQ ID NO: 11207 - RNA, 19 nt, artificial
  Oligomer
ugaucuuagggaugauaaa

SEQ ID NO: 11208 - RNA, 19 nt, artificial
  Oligomer
ugcagaauuguggaguguu

SEQ ID NO: 11209 - RNA, 19 nt, artificial
  Oligomer
uaaauugacaguugcagaa

SEQ ID NO: 11210 - RNA, 19 nt, artificial
  Oligomer
ccuucagccacuacaacag

SEQ ID NO: 11211 - RNA, 19 nt, artificial
  Oligomer
cccuucagccacuacaaca

SEQ ID NO: 11212 - RNA, 19 nt, artificial
  Oligomer
cuguacaacuuaacucacu

SEQ ID NO: 11213 - RNA, 19 nt, artificial
  Oligomer
gaaccuucuuaacaucacu

SEQ ID NO: 11214 - RNA, 19 nt, artificial
  Oligomer
ugaaccuucuuaacaucac

SEQ ID NO: 11215 - RNA, 19 nt, artificial
  Oligomer
ucauguguugcagcuuuau

SEQ ID NO: 11216 - RNA, 19 nt, artificial
  Oligomer
gggugugugugaucaaagg

SEQ ID NO: 11217 - RNA, 19 nt, artificial
  Oligomer
ugcucuccuauguaguucu

SEQ ID NO: 11218 - RNA, 19 nt, artificial
  Oligomer
gacacuugcucuccuaugu

SEQ ID NO: 11219 - RNA, 19 nt, artificial
  Oligomer
gccuucuuaaagccuuauu

SEQ ID NO: 11220 - RNA, 19 nt, artificial
  Oligomer
gcuguuguaaaugucucag

SEQ ID NO: 11221 - RNA, 19 nt, artificial
  Oligomer
gcuaaggagauuggugcug

SEQ ID NO: 11222 - RNA, 19 nt, artificial
  Oligomer
ggcuaaggagauuggugcu

SEQ ID NO: 11223 - RNA, 19 nt, artificial
  Oligomer
cuugaucuuagggaugaua

SEQ ID NO: 11224 - RNA, 19 nt, artificial
  Oligomer
acuugaucuuagggaugau

SEQ ID NO: 11225 - RNA, 19 nt, artificial
  Oligomer
cauugaucuuuugcuaaug

SEQ ID NO: 11226 - RNA, 19 nt, artificial
  Oligomer
cagccacuacaacagaauu

SEQ ID NO: 11227 - RNA, 19 nt, artificial
  Oligomer
caacuuaacucacuggcga

SEQ ID NO: 11228 - RNA, 19 nt, artificial
  Oligomer
gccuccuuguauuauaaaa

SEQ ID NO: 11229 - RNA, 19 nt, artificial
  Oligomer
aggaaauguuuucuuaagc

SEQ ID NO: 11230 - RNA, 19 nt, artificial
  Oligomer
agaauucuguuuagcugug

SEQ ID NO: 11231 - RNA, 19 nt, artificial
  Oligomer
ggagauuuugaacagaacu

SEQ ID NO: 11232 - RNA, 19 nt, artificial
  Oligomer
uuggaucagucuuugugau

SEQ ID NO: 11233 - RNA, 19 nt, artificial
  Oligomer
acauuguacuguaauggag

SEQ ID NO: 11234 - RNA, 19 nt, artificial
  Oligomer
ccgacauaacauuguacug

SEQ ID NO: 11235 - RNA, 19 nt, artificial
  Oligomer
cagugaguuagcagcacgu

SEQ ID NO: 11236 - RNA, 19 nt, artificial
  Oligomer
cacuugcucuccuauguag

SEQ ID NO: 11237 - RNA, 19 nt, artificial
  Oligomer
ugcuguuguaaaugucuca

SEQ ID NO: 11238 - RNA, 19 nt, artificial
  Oligomer
uguagucgcuuugccuauu

SEQ ID NO: 11239 - RNA, 19 nt, artificial
  Oligomer
guaaaaaucauguguugca

SEQ ID NO: 11240 - RNA, 19 nt, artificial
  Oligomer
gaagaauucuguuuagcug

SEQ ID NO: 11241 - RNA, 19 nt, artificial
  Oligomer
gagauuuugaacagaacug

SEQ ID NO: 11242 - RNA, 19 nt, artificial
  Oligomer
ucagcucuuuggaucaguc

SEQ ID NO: 11243 - RNA, 19 nt, artificial
  Oligomer
gcucagcucuuuggaucag

SEQ ID NO: 11244 - RNA, 19 nt, artificial
  Oligomer
ucccgacauaacauuguac

SEQ ID NO: 11245 - RNA, 19 nt, artificial
  Oligomer
cagacacuugcucuccuau

SEQ ID NO: 11246 - RNA, 19 nt, artificial
  Oligomer
cugcuguuguaaaugucuc

SEQ ID NO: 11247 - RNA, 19 nt, artificial
  Oligomer
ugcuguaaaauaccuggag

SEQ ID NO: 11248 - RNA, 19 nt, artificial
  Oligomer
gugcuguaaaauaccugga

SEQ ID NO: 11249 - RNA, 19 nt, artificial
  Oligomer
ugcggagauuuugaacaga

SEQ ID NO: 11250 - RNA, 19 nt, artificial
  Oligomer
cucagcucuuuggaucagu

SEQ ID NO: 11251 - RNA, 19 nt, artificial
  Oligomer
uucccgacauaacauugua

SEQ ID NO: 11252 - RNA, 19 nt, artificial
  Oligomer
caagacaguguuugacgaa

SEQ ID NO: 11253 - RNA, 19 nt, artificial
  Oligomer
gcauuauguuuugcaugua

SEQ ID NO: 11254 - RNA, 19 nt, artificial
  Oligomer
cuguagucgcuuugccuau

SEQ ID NO: 11255 - RNA, 19 nt, artificial
  Oligomer
cuguuuagcugugggugug

SEQ ID NO: 11256 - RNA, 19 nt, artificial
  Oligomer
cuuuugcggagauuuugaa

SEQ ID NO: 11257 - RNA, 19 nt, artificial
  Oligomer
agcucuuuggaucagucuu

SEQ ID NO: 11258 - RNA, 19 nt, artificial
  Oligomer
guacuguaauggagugagc

SEQ ID NO: 11259 - RNA, 19 nt, artificial
  Oligomer
cgaaugaagcguugccauu

SEQ ID NO: 11260 - RNA, 19 nt, artificial
  Oligomer
caaaauaccuucugaacua

SEQ ID NO: 11261 - RNA, 19 nt, artificial
  Oligomer
agaguugccaaaauaccuu

SEQ ID NO: 11262 - RNA, 19 nt, artificial
  Oligomer
ccuguagucgcuuugccua

SEQ ID NO: 11263 - RNA, 19 nt, artificial
  Oligomer
gaccaauacugacccucuu

SEQ ID NO: 11264 - RNA, 19 nt, artificial
  Oligomer
ugaagaauucuguuuagcu

SEQ ID NO: 11265 - RNA, 19 nt, artificial
  Oligomer
ucagaugcguaaagcagaa

SEQ ID NO: 11266 - RNA, 19 nt, artificial
  Oligomer
ugccaaaauaccuucugaa

SEQ ID NO: 11267 - RNA, 19 nt, artificial
  Oligomer
ucaagacaguguuugacga

SEQ ID NO: 11268 - RNA, 19 nt, artificial
  Oligomer
agaagaagcugacucccau

SEQ ID NO: 11269 - RNA, 19 nt, artificial
  Oligomer
uagauggaaaaccggugaa

SEQ ID NO: 11270 - RNA, 19 nt, artificial
  Oligomer
guagauggaaaaccgguga

SEQ ID NO: 11271 - RNA, 19 nt, artificial
  Oligomer
cacugucacuugaccaaua

SEQ ID NO: 11272 - RNA, 19 nt, artificial
  Oligomer
cccaaauugggcauuuaau

SEQ ID NO: 11273 - RNA, 19 nt, artificial
  Oligomer
ccgaaugaagcguugccau

SEQ ID NO: 11274 - RNA, 19 nt, artificial
  Oligomer
agccuucuuaaagccuuau

SEQ ID NO: 11275 - RNA, 19 nt, artificial
  Oligomer
aagaagaggaagagaaaau

SEQ ID NO: 11276 - RNA, 19 nt, artificial
  Oligomer
ugaaggagaagaagcugac

SEQ ID NO: 11277 - RNA, 19 nt, artificial
  Oligomer
cgauguucuguacaacuua

SEQ ID NO: 11278 - RNA, 19 nt, artificial
  Oligomer
cuaguaacuagguguaaaa

SEQ ID NO: 11279 - RNA, 19 nt, artificial
  Oligomer
ccaaauugggcauuuaauu

SEQ ID NO: 11280 - RNA, 19 nt, artificial
  Oligomer
gcucuuuggaucagucuuu

SEQ ID NO: 11281 - RNA, 19 nt, artificial
  Oligomer
gagcacugaacuuugcaaa

SEQ ID NO: 11282 - RNA, 19 nt, artificial
  Oligomer
cagauuaagaguugccaaa

SEQ ID NO: 11283 - RNA, 19 nt, artificial
  Oligomer
caagccuucuuaaagccuu

SEQ ID NO: 11284 - RNA, 19 nt, artificial
  Oligomer
agagaaaaugccugcuguu

SEQ ID NO: 11285 - RNA, 19 nt, artificial
  Oligomer
agaagaggaagagaaaaug

SEQ ID NO: 11286 - RNA, 19 nt, artificial
  Oligomer
gaagaagaggaagagaaaa

SEQ ID NO: 11287 - RNA, 19 nt, artificial
  Oligomer
acgauguucuguacaacuu

SEQ ID NO: 11288 - RNA, 19 nt, artificial
  Oligomer
cugugcuagugcugacgau

SEQ ID NO: 11289 - RNA, 19 nt, artificial
  Oligomer
ugccuccuuguauuauaaa

SEQ ID NO: 11290 - RNA, 19 nt, artificial
  Oligomer
ccaaaauaccuucugaacu

SEQ ID NO: 11291 - RNA, 19 nt, artificial
  Oligomer
gccaaaauaccuucugaac

SEQ ID NO: 11292 - RNA, 19 nt, artificial
  Oligomer
agauuaagaguugccaaaa

SEQ ID NO: 11293 - RNA, 19 nt, artificial
  Oligomer
gaagagaaaaugccugcug

SEQ ID NO: 11294 - RNA, 19 nt, artificial
  Oligomer
cgaucgagaaacugaagga

SEQ ID NO: 11295 - RNA, 19 nt, artificial
  Oligomer
augccuccuuguauuauaa

SEQ ID NO: 11296 - RNA, 19 nt, artificial
  Oligomer
ccugucccuuggaaccuuu

SEQ ID NO: 11297 - RNA, 19 nt, artificial
  Oligomer
cgagaaacugaaggagaag

SEQ ID NO: 11298 - RNA, 19 nt, artificial
  Oligomer
agauggaaaaccggugaau

SEQ ID NO: 11299 - RNA, 19 nt, artificial
  Oligomer
gcuaaugcaauuagcauua

SEQ ID NO: 11300 - RNA, 19 nt, artificial
  Oligomer
ugauguuccuuugggucug

SEQ ID NO: 11301 - RNA, 19 nt, artificial
  Oligomer
gacacugucacuugaccaa

SEQ ID NO: 11302 - RNA, 19 nt, artificial
  Oligomer
gugugugugaucaaaggac

SEQ ID NO: 11303 - RNA, 19 nt, artificial
  Oligomer
gaccagcuuuugcggagau

SEQ ID NO: 11304 - RNA, 19 nt, artificial
  Oligomer
cguagcagcucagcucuuu

SEQ ID NO: 11305 - RNA, 19 nt, artificial
  Oligomer
ccauugaacucaccaguga

SEQ ID NO: 11306 - RNA, 19 nt, artificial
  Oligomer
gcguugccauugaacucac

SEQ ID NO: 11307 - RNA, 19 nt, artificial
  Oligomer
gcacugaacuuugcaaaga

SEQ ID NO: 11308 - RNA, 19 nt, artificial
  Oligomer
aagccuucuuaaagccuua

SEQ ID NO: 11309 - RNA, 19 nt, artificial
  Oligomer
ucauccuagugggaacuaa

SEQ ID NO: 11310 - RNA, 19 nt, artificial
  Oligomer
ucccuugugaguccugcau

SEQ ID NO: 11311 - RNA, 19 nt, artificial
  Oligomer
agcauuauguuuugcaugu

SEQ ID NO: 11312 - RNA, 19 nt, artificial
  Oligomer
gauguucuguacaacuuaa

SEQ ID NO: 11313 - RNA, 19 nt, artificial
  Oligomer
acugucacuugaccaauac

SEQ ID NO: 11314 - RNA, 19 nt, artificial
  Oligomer
ucagauuaagaguugccaa

SEQ ID NO: 11315 - RNA, 19 nt, artificial
  Oligomer
agguaaaacuugccuacug

SEQ ID NO: 11316 - RNA, 19 nt, artificial
  Oligomer
uccugucccuuggaaccuu

SEQ ID NO: 11317 - RNA, 19 nt, artificial
  Oligomer
ccaucauccuagugggaac

SEQ ID NO: 11318 - RNA, 19 nt, artificial
  Oligomer
uuaacucacuggcgagaau

SEQ ID NO: 11319 - RNA, 19 nt, artificial
  Oligomer
ugcuagugcugacgauguu

SEQ ID NO: 11320 - RNA, 19 nt, artificial
  Oligomer
acacugucacuugaccaau

SEQ ID NO: 11321 - RNA, 19 nt, artificial
  Oligomer
cgacacugucacuugacca

SEQ ID NO: 11322 - RNA, 19 nt, artificial
  Oligomer
ucacugucuugccagauua

SEQ ID NO: 11323 - RNA, 19 nt, artificial
  Oligomer
caaggaaugaaagugucac

SEQ ID NO: 11324 - RNA, 19 nt, artificial
  Oligomer
cuacugaucaguuacacaa

SEQ ID NO: 11325 - RNA, 19 nt, artificial
  Oligomer
gccuacugaucaguuacac

SEQ ID NO: 11326 - RNA, 19 nt, artificial
  Oligomer
gcagacacuugcucuccua

SEQ ID NO: 11327 - RNA, 19 nt, artificial
  Oligomer
uucagacucacauucuauu

SEQ ID NO: 11328 - RNA, 19 nt, artificial
  Oligomer
ccauuuuuugaaccaauca

SEQ ID NO: 11329 - RNA, 19 nt, artificial
  Oligomer
ucgcacucaaugccaacuu

SEQ ID NO: 11330 - RNA, 19 nt, artificial
  Oligomer
gucuagccauggcuaagga

SEQ ID NO: 11331 - RNA, 19 nt, artificial
  Oligomer
gaacuaaacuugaucuuag

SEQ ID NO: 11332 - RNA, 19 nt, artificial
  Oligomer
ccuagugggaacuaaacuu

SEQ ID NO: 11333 - RNA, 19 nt, artificial
  Oligomer
cuuuugcuaaugcaauuag

SEQ ID NO: 11334 - RNA, 19 nt, artificial
  Oligomer
ucuaguaacuagguguaaa

SEQ ID NO: 11335 - RNA, 19 nt, artificial
  Oligomer
ucugucaaaugcaguagau

SEQ ID NO: 11336 - RNA, 19 nt, artificial
  Oligomer
cagcuuuugcggagauuuu

SEQ ID NO: 11337 - RNA, 19 nt, artificial
  Oligomer
cuugccuacugaucaguua

SEQ ID NO: 11338 - RNA, 19 nt, artificial
  Oligomer
gccuuauuuuucaaaagcg

SEQ ID NO: 11339 - RNA, 19 nt, artificial
  Oligomer
gcccuaaaaugacaagccu

SEQ ID NO: 11340 - RNA, 19 nt, artificial
  Oligomer
ucagacucacauucuauua

SEQ ID NO: 11341 - RNA, 19 nt, artificial
  Oligomer
ugcuaaugcaauuagcauu

SEQ ID NO: 11342 - RNA, 19 nt, artificial
  Oligomer
gcuauuuccucuaaugaag

SEQ ID NO: 11343 - RNA, 19 nt, artificial
  Oligomer
uugaacagaacugcuauuu

SEQ ID NO: 11344 - RNA, 19 nt, artificial
  Oligomer
ugaccagcuuuugcggaga

SEQ ID NO: 11345 - RNA, 19 nt, artificial
  Oligomer
cucuuuggaucagucuuug

SEQ ID NO: 11346 - RNA, 19 nt, artificial
  Oligomer
ugacaagccuucuuaaagc

SEQ ID NO: 11347 - RNA, 19 nt, artificial
  Oligomer
cccuaaaaugacaagccuu

SEQ ID NO: 11348 - RNA, 19 nt, artificial
  Oligomer
uaagaguucagacucacau

SEQ ID NO: 11349 - RNA, 19 nt, artificial
  Oligomer
cgcacucaaugccaacuuu

SEQ ID NO: 11350 - RNA, 19 nt, artificial
  Oligomer
cugacucccaucaccuauc

SEQ ID NO: 11351 - RNA, 19 nt, artificial
  Oligomer
gcugacucccaucaccuau

SEQ ID NO: 11352 - RNA, 19 nt, artificial
  Oligomer
ugaacagaacugcuauuuc

SEQ ID NO: 11353 - RNA, 19 nt, artificial
  Oligomer
ccagcuuuugcggagauuu

SEQ ID NO: 11354 - RNA, 19 nt, artificial
  Oligomer
gccauugaacucaccagug

SEQ ID NO: 11355 - RNA, 19 nt, artificial
  Oligomer
agcguugccauugaacuca

SEQ ID NO: 11356 - RNA, 19 nt, artificial
  Oligomer
ccuucgucuuugagaagac

SEQ ID NO: 11357 - RNA, 19 nt, artificial
  Oligomer
agaccuucgucuuugagaa

SEQ ID NO: 11358 - RNA, 19 nt, artificial
  Oligomer
gcaaagaccuucgucuuug

SEQ ID NO: 11359 - RNA, 19 nt, artificial
  Oligomer
agccuuauuuuucaaaagc

SEQ ID NO: 11360 - RNA, 19 nt, artificial
  Oligomer
gccauggcuaaggagauug

SEQ ID NO: 11361 - RNA, 19 nt, artificial
  Oligomer
agccauggcuaaggagauu

SEQ ID NO: 11362 - RNA, 19 nt, artificial
  Oligomer
cuagugggaacuaaacuug

SEQ ID NO: 11363 - RNA, 19 nt, artificial
  Oligomer
uucuuaacaucacugucuu

SEQ ID NO: 11364 - RNA, 19 nt, artificial
  Oligomer
accagcuuuugcggagauu

SEQ ID NO: 11365 - RNA, 19 nt, artificial
  Oligomer
gcgaguuuucugaccagcu

SEQ ID NO: 11366 - RNA, 19 nt, artificial
  Oligomer
ugccauugaacucaccagu

SEQ ID NO: 11367 - RNA, 19 nt, artificial
  Oligomer
ugaacuuugcaaagaccuu

SEQ ID NO: 11368 - RNA, 19 nt, artificial
  Oligomer
gcauuguugugccgagaac

SEQ ID NO: 11369 - RNA, 19 nt, artificial
  Oligomer
cugcauuguugugccgaga

SEQ ID NO: 11370 - RNA, 19 nt, artificial
  Oligomer
cuaaacuugaucuuaggga

SEQ ID NO: 11371 - RNA, 19 nt, artificial
  Oligomer
gacccuucagccacuacaa

SEQ ID NO: 11372 - RNA, 19 nt, artificial
  Oligomer
ugacgauguucuguacaac

SEQ ID NO: 11373 - RNA, 19 nt, artificial
  Oligomer
aucacugucuugccagauu

SEQ ID NO: 11374 - RNA, 19 nt, artificial
  Oligomer
ugagcaauaugccuccuug

SEQ ID NO: 11375 - RNA, 19 nt, artificial
  Oligomer
cagaacugcuauuuccucu

SEQ ID NO: 11376 - RNA, 19 nt, artificial
  Oligomer
gcacguguucccgacauaa

SEQ ID NO: 11377 - RNA, 19 nt, artificial
  Oligomer
agcacguguucccgacaua

SEQ ID NO: 11378 - RNA, 19 nt, artificial
  Oligomer
aguucagacucacauucua

SEQ ID NO: 11379 - RNA, 19 nt, artificial
  Oligomer
ccucuaaugaagaauucug

SEQ ID NO: 11380 - RNA, 19 nt, artificial
  Oligomer
ugaacucaccagugaguua

SEQ ID NO: 11381 - RNA, 19 nt, artificial
  Oligomer
acacuugcucuccuaugua

SEQ ID NO: 11382 - RNA, 19 nt, artificial
  Oligomer
accuucgucuuugagaaga

SEQ ID NO: 11383 - RNA, 19 nt, artificial
  Oligomer
caaagaccuucgucuuuga

SEQ ID NO: 11384 - RNA, 19 nt, artificial
  Oligomer
ugcaaagaccuucgucuuu

SEQ ID NO: 11385 - RNA, 19 nt, artificial
  Oligomer
agaguucagacucacauuc

SEQ ID NO: 11386 - RNA, 19 nt, artificial
  Oligomer
ugaucuuuugcuaaugcaa

SEQ ID NO: 11387 - RNA, 19 nt, artificial
  Oligomer
uaagugcuuuccuuaguuu

SEQ ID NO: 11388 - RNA, 19 nt, artificial
  Oligomer
agcaauaugccuccuugua

SEQ ID NO: 11389 - RNA, 19 nt, artificial
  Oligomer
cucuaaugaagaauucugu

SEQ ID NO: 11390 - RNA, 19 nt, artificial
  Oligomer
accagugaguuagcagcac

SEQ ID NO: 11391 - RNA, 19 nt, artificial
  Oligomer
ugccuacugaucaguuaca

SEQ ID NO: 11392 - RNA, 19 nt, artificial
  Oligomer
cgucuuugagaagacggua

SEQ ID NO: 11393 - RNA, 19 nt, artificial
  Oligomer
ucgucuuugagaagacggu

SEQ ID NO: 11394 - RNA, 19 nt, artificial
  Oligomer
ccuucgcacucaaugccaa

SEQ ID NO: 11395 - RNA, 19 nt, artificial
  Oligomer
agggucuagccauggcuaa

SEQ ID NO: 11396 - RNA, 19 nt, artificial
  Oligomer
gccagauuaccgacacugu

SEQ ID NO: 11397 - RNA, 19 nt, artificial
  Oligomer
accuucuuaacaucacugu

SEQ ID NO: 11398 - RNA, 19 nt, artificial
  Oligomer
cugagcaauaugccuccuu

SEQ ID NO: 11399 - RNA, 19 nt, artificial
  Oligomer
gaacagaacugcuauuucc

SEQ ID NO: 11400 - RNA, 19 nt, artificial
  Oligomer
guguucccgacauaacauu

SEQ ID NO: 11401 - RNA, 19 nt, artificial
  Oligomer
gaacucaccagugaguuag

SEQ ID NO: 11402 - RNA, 19 nt, artificial
  Oligomer
ugcagacacuugcucuccu

SEQ ID NO: 11403 - RNA, 19 nt, artificial
  Oligomer
gucuuugagaagacgguag

SEQ ID NO: 11404 - RNA, 19 nt, artificial
  Oligomer
agauuaccgacacugucac

SEQ ID NO: 11405 - RNA, 19 nt, artificial
  Oligomer
ccagauuaccgacacuguc

SEQ ID NO: 11406 - RNA, 19 nt, artificial
  Oligomer
uuccucuaaugaagaauuc

SEQ ID NO: 11407 - RNA, 19 nt, artificial
  Oligomer
gcagcucagcucuuuggau

SEQ ID NO: 11408 - RNA, 19 nt, artificial
  Oligomer
cguguucccgacauaacau

SEQ ID NO: 11409 - RNA, 19 nt, artificial
  Oligomer
ugcauuguugugccgagaa

SEQ ID NO: 11410 - RNA, 19 nt, artificial
  Oligomer
uugguccugucccuuggaa

SEQ ID NO: 11411 - RNA, 19 nt, artificial
  Oligomer
ugccagauuaccgacacug

SEQ ID NO: 11412 - RNA, 19 nt, artificial
  Oligomer
cagcucagcucuuuggauc

SEQ ID NO: 11413 - RNA, 19 nt, artificial
  Oligomer
uggagccuucgcacucaau

SEQ ID NO: 11414 - RNA, 19 nt, artificial
  Oligomer
acaucacugucuugccaga

SEQ ID NO: 11415 - RNA, 19 nt, artificial
  Oligomer
cuucuuaacaucacugucu

SEQ ID NO: 11416 - RNA, 19 nt, artificial
  Oligomer
cccaucauccuagugggaa

SEQ ID NO: 11417 - RNA, 19 nt, artificial
  Oligomer
gggaugauaaagacacgau

SEQ ID NO: 11418 - RNA, 19 nt, artificial
  Oligomer
uuggugcuguaaaauaccu

SEQ ID NO: 11419 - RNA, 19 nt, artificial
  Oligomer
uaaagagggucaguauugg

SEQ ID NO: 11420 - RNA, 19 nt, artificial
  Oligomer
aaauaaggcuuuaagaagg

SEQ ID NO: 11421 - RNA, 19 nt, artificial
  Oligomer
uuuuacagcaccaaucucc

SEQ ID NO: 11422 - RNA, 19 nt, artificial
  Oligomer
guuugcggauaggauaggg

SEQ ID NO: 11423 - RNA, 19 nt, artificial
  Oligomer
aaagaugaauuaaaugccc

SEQ ID NO: 11424 - RNA, 19 nt, artificial
  Oligomer
aagcuggucagaaaacucg

SEQ ID NO: 11425 - RNA, 19 nt, artificial
  Oligomer
aucaauguaaaaacacucc

SEQ ID NO: 11426 - RNA, 19 nt, artificial
  Oligomer
aaacacuccacaauucugc

SEQ ID NO: 11427 - RNA, 19 nt, artificial
  Oligomer
aacacaugauuuuuacacc

SEQ ID NO: 11428 - RNA, 19 nt, artificial
  Oligomer
uuagaggaaauagcaguuc

SEQ ID NO: 11429 - RNA, 19 nt, artificial
  Oligomer
aagaucaaguuuaguuccc

SEQ ID NO: 11430 - RNA, 19 nt, artificial
  Oligomer
aaagagggucaguauuggu

SEQ ID NO: 11431 - RNA, 19 nt, artificial
  Oligomer
aaaacucgcuaugaaauca

SEQ ID NO: 11432 - RNA, 19 nt, artificial
  Oligomer
aaacucgcuaugaaaucac

SEQ ID NO: 11433 - RNA, 19 nt, artificial
  Oligomer
uuacgcaucugagaacuac

SEQ ID NO: 11434 - RNA, 19 nt, artificial
  Oligomer
uguuugcggauaggauagg

SEQ ID NO: 11435 - RNA, 19 nt, artificial
  Oligomer
aacaucaauaggcaaagcg

SEQ ID NO: 11436 - RNA, 19 nt, artificial
  Oligomer
aaagcacuuuuacuaaucg

SEQ ID NO: 11437 - RNA, 19 nt, artificial
  Oligomer
auauugcucagucagaagg

SEQ ID NO: 11438 - RNA, 19 nt, artificial
  Oligomer
uauugcucagucagaaggg

SEQ ID NO: 11439 - RNA, 19 nt, artificial
  Oligomer
aaaucacaaagacugaucc

SEQ ID NO: 11440 - RNA, 19 nt, artificial
  Oligomer
caaaggaacaucaauaggc

SEQ ID NO: 11441 - RNA, 19 nt, artificial
  Oligomer
aaaggaacaucaauaggca

SEQ ID NO: 11442 - RNA, 19 nt, artificial
  Oligomer
aucgcuucgucaaacacug

SEQ ID NO: 11443 - RNA, 19 nt, artificial
  Oligomer
caacacaugauuuuuacac

SEQ ID NO: 11444 - RNA, 19 nt, artificial
  Oligomer
uguaagagaaaggaaaagc

SEQ ID NO: 11445 - RNA, 19 nt, artificial
  Oligomer
agcuuaagaaaacauuucc

SEQ ID NO: 11446 - RNA, 19 nt, artificial
  Oligomer
aaccuuucuuucaucaucu

SEQ ID NO: 11447 - RNA, 19 nt, artificial
  Oligomer
uuucuuucaucaucuacug

SEQ ID NO: 11448 - RNA, 19 nt, artificial
  Oligomer
uucuuucaucaucuacugc

SEQ ID NO: 11449 - RNA, 19 nt, artificial
  Oligomer
uucauuccuuguacaaugu

SEQ ID NO: 11450 - RNA, 19 nt, artificial
  Oligomer
uagaggaaauagcaguucu

SEQ ID NO: 11451 - RNA, 19 nt, artificial
  Oligomer
uaugaaaucacaaagacug

SEQ ID NO: 11452 - RNA, 19 nt, artificial
  Oligomer
uuaauagaaugugagucug

SEQ ID NO: 11453 - RNA, 19 nt, artificial
  Oligomer
uauuuuacagcaccaaucu

SEQ ID NO: 11454 - RNA, 19 nt, artificial
  Oligomer
aaaauucuguuguaguggc

SEQ ID NO: 11455 - RNA, 19 nt, artificial
  Oligomer
uagcacaguuuacagaacc

SEQ ID NO: 11456 - RNA, 19 nt, artificial
  Oligomer
uacagaaccucacagaccc

SEQ ID NO: 11457 - RNA, 19 nt, artificial
  Oligomer
gauuuuuacaccuaguuac

SEQ ID NO: 11458 - RNA, 19 nt, artificial
  Oligomer
aagaugaauuaaaugccca

SEQ ID NO: 11459 - RNA, 19 nt, artificial
  Oligomer
aacauuuccugauaauacc

SEQ ID NO: 11460 - RNA, 19 nt, artificial
  Oligomer
uuccugauaauaccaaccu

SEQ ID NO: 11461 - RNA, 19 nt, artificial
  Oligomer
acacuuucauuccuuguac

SEQ ID NO: 11462 - RNA, 19 nt, artificial
  Oligomer
auuagaggaaauagcaguu

SEQ ID NO: 11463 - RNA, 19 nt, artificial
  Oligomer
caucugagaacuacauagg

SEQ ID NO: 11464 - RNA, 19 nt, artificial
  Oligomer
auuuuggcaacucuuaauc

SEQ ID NO: 11465 - RNA, 19 nt, artificial
  Oligomer
auuuucaaaugaugcagga

SEQ ID NO: 11466 - RNA, 19 nt, artificial
  Oligomer
acaagggaaaagcaaauua

SEQ ID NO: 11467 - RNA, 19 nt, artificial
  Oligomer
uaaaaacacuccacaauuc

SEQ ID NO: 11468 - RNA, 19 nt, artificial
  Oligomer
aaaaauucuguuguagugg

SEQ ID NO: 11469 - RNA, 19 nt, artificial
  Oligomer
uuguacagaacaucgucag

SEQ ID NO: 11470 - RNA, 19 nt, artificial
  Oligomer
acacaugauuuuuacaccu

SEQ ID NO: 11471 - RNA, 19 nt, artificial
  Oligomer
acaugauuuuuacaccuag

SEQ ID NO: 11472 - RNA, 19 nt, artificial
  Oligomer
uagaaaacuaaggaaagca

SEQ ID NO: 11473 - RNA, 19 nt, artificial
  Oligomer
guaagagaaaggaaaagcu

SEQ ID NO: 11474 - RNA, 19 nt, artificial
  Oligomer
uuuccugauaauaccaacc

SEQ ID NO: 11475 - RNA, 19 nt, artificial
  Oligomer
uaauaccaaccuuucuuuc

SEQ ID NO: 11476 - RNA, 19 nt, artificial
  Oligomer
aucaucuacugcauuugac

SEQ ID NO: 11477 - RNA, 19 nt, artificial
  Oligomer
uucauuagaggaaauagca

SEQ ID NO: 11478 - RNA, 19 nt, artificial
  Oligomer
augaaaucacaaagacuga

SEQ ID NO: 11479 - RNA, 19 nt, artificial
  Oligomer
augcaguguaguucagaag

SEQ ID NO: 11480 - RNA, 19 nt, artificial
  Oligomer
gauugguucaaaaaauggu

SEQ ID NO: 11481 - RNA, 19 nt, artificial
  Oligomer
gcuucgucaaacacugucu

SEQ ID NO: 11482 - RNA, 19 nt, artificial
  Oligomer
uuuacagcaccaaucuccu

SEQ ID NO: 11483 - RNA, 19 nt, artificial
  Oligomer
uacagaacaucgucagcac

SEQ ID NO: 11484 - RNA, 19 nt, artificial
  Oligomer
aguuacuagaaaacuaagg

SEQ ID NO: 11485 - RNA, 19 nt, artificial
  Oligomer
aagcacuuuuacuaaucga

SEQ ID NO: 11486 - RNA, 19 nt, artificial
  Oligomer
aauacaaggaggcauauug

SEQ ID NO: 11487 - RNA, 19 nt, artificial
  Oligomer
auacaaggaggcauauugc

SEQ ID NO: 11488 - RNA, 19 nt, artificial
  Oligomer
auuuccugauaauaccaac

SEQ ID NO: 11489 - RNA, 19 nt, artificial
  Oligomer
aauaccaaccuuucuuuca

SEQ ID NO: 11490 - RNA, 19 nt, artificial
  Oligomer
ucuuucaucaucuacugca

SEQ ID NO: 11491 - RNA, 19 nt, artificial
  Oligomer
uuucauuccuuguacaaug

SEQ ID NO: 11492 - RNA, 19 nt, artificial
  Oligomer
cauuagaggaaauagcagu

SEQ ID NO: 11493 - RNA, 19 nt, artificial
  Oligomer
uucuguucaaaaucuccgc

SEQ ID NO: 11494 - RNA, 19 nt, artificial
  Oligomer
aacucgcuaugaaaucaca

SEQ ID NO: 11495 - RNA, 19 nt, artificial
  Oligomer
aucugagaacuacauagga

SEQ ID NO: 11496 - RNA, 19 nt, artificial
  Oligomer
ucugagaacuacauaggag

SEQ ID NO: 11497 - RNA, 19 nt, artificial
  Oligomer
uaagaaggcuugucauuuu

SEQ ID NO: 11498 - RNA, 19 nt, artificial
  Oligomer
ccuuaaaauuacugauugg

SEQ ID NO: 11499 - RNA, 19 nt, artificial
  Oligomer
auuuuacagcaccaaucuc

SEQ ID NO: 11500 - RNA, 19 nt, artificial
  Oligomer
ugaugcaggacucacaagg

SEQ ID NO: 11501 - RNA, 19 nt, artificial
  Oligomer
aaaaacacuccacaauucu

SEQ ID NO: 11502 - RNA, 19 nt, artificial
  Oligomer
aaauucuguuguaguggcu

SEQ ID NO: 11503 - RNA, 19 nt, artificial
  Oligomer
auucuguuguaguggcuga

SEQ ID NO: 11504 - RNA, 19 nt, artificial
  Oligomer
aguuuacagaaccucacag

SEQ ID NO: 11505 - RNA, 19 nt, artificial
  Oligomer
guuacuagaaaacuaagga

SEQ ID NO: 11506 - RNA, 19 nt, artificial
  Oligomer
cuuaagaaaacauuuccug

SEQ ID NO: 11507 - RNA, 19 nt, artificial
  Oligomer
cauuccuuguacaauguag

SEQ ID NO: 11508 - RNA, 19 nt, artificial
  Oligomer
ucauuagaggaaauagcag

SEQ ID NO: 11509 - RNA, 19 nt, artificial
  Oligomer
aaaagcuggucagaaaacu

SEQ ID NO: 11510 - RNA, 19 nt, artificial
  Oligomer
gucuuugcaaaguucagug

SEQ ID NO: 11511 - RNA, 19 nt, artificial
  Oligomer
aagaaggcuugucauuuua

SEQ ID NO: 11512 - RNA, 19 nt, artificial
  Oligomer
uacagcaccaaucuccuua

SEQ ID NO: 11513 - RNA, 19 nt, artificial
  Oligomer
ccaaucuccuuagccaugg

SEQ ID NO: 11514 - RNA, 19 nt, artificial
  Oligomer
agaucaaguuuaguuccca

SEQ ID NO: 11515 - RNA, 19 nt, artificial
  Oligomer
gaucaaguuuaguucccac

SEQ ID NO: 11516 - RNA, 19 nt, artificial
  Oligomer
uucaaaugaugcaggacuc

SEQ ID NO: 11517 - RNA, 19 nt, artificial
  Oligomer
aagucauacaugcaaaaca

SEQ ID NO: 11518 - RNA, 19 nt, artificial
  Oligomer
ucaauguaaaaacacucca

SEQ ID NO: 11519 - RNA, 19 nt, artificial
  Oligomer
agaacaucgucagcacuag

SEQ ID NO: 11520 - RNA, 19 nt, artificial
  Oligomer
guuuacagaaccucacaga

SEQ ID NO: 11521 - RNA, 19 nt, artificial
  Oligomer
uuuacagaaccucacagac

SEQ ID NO: 11522 - RNA, 19 nt, artificial
  Oligomer
uuacagaaccucacagacc

SEQ ID NO: 11523 - RNA, 19 nt, artificial
  Oligomer
gaacaucaauaggcaaagc

SEQ ID NO: 11524 - RNA, 19 nt, artificial
  Oligomer
agaaaggaaaagcuuaaga

SEQ ID NO: 11525 - RNA, 19 nt, artificial
  Oligomer
ucaucaucuacugcauuug

SEQ ID NO: 11526 - RNA, 19 nt, artificial
  Oligomer
uccuuguacaauguagugu

SEQ ID NO: 11527 - RNA, 19 nt, artificial
  Oligomer
aaagcuggucagaaaacuc

SEQ ID NO: 11528 - RNA, 19 nt, artificial
  Oligomer
uacaguacaauguuauguc

SEQ ID NO: 11529 - RNA, 19 nt, artificial
  Oligomer
acaguacaauguuaugucg

SEQ ID NO: 11530 - RNA, 19 nt, artificial
  Oligomer
aguacaauguuaugucggg

SEQ ID NO: 11531 - RNA, 19 nt, artificial
  Oligomer
gagaacuacauaggagagc

SEQ ID NO: 11532 - RNA, 19 nt, artificial
  Oligomer
aacaaugcaguguaguuca

SEQ ID NO: 11533 - RNA, 19 nt, artificial
  Oligomer
aaugcaguguaguucagaa

SEQ ID NO: 11534 - RNA, 19 nt, artificial
  Oligomer
gaaggcuugucauuuuagg

SEQ ID NO: 11535 - RNA, 19 nt, artificial
  Oligomer
agcaggcauuuucucuucc

SEQ ID NO: 11536 - RNA, 19 nt, artificial
  Oligomer
gaucaauguaaaaacacuc

SEQ ID NO: 11537 - RNA, 19 nt, artificial
  Oligomer
caauguaaaaacacuccac

SEQ ID NO: 11538 - RNA, 19 nt, artificial
  Oligomer
aauguaaaaacacuccaca

SEQ ID NO: 11539 - RNA, 19 nt, artificial
  Oligomer
aaaacacuccacaauucug

SEQ ID NO: 11540 - RNA, 19 nt, artificial
  Oligomer
guacagaacaucgucagca

SEQ ID NO: 11541 - RNA, 19 nt, artificial
  Oligomer
agcacaguuuacagaaccu

SEQ ID NO: 11542 - RNA, 19 nt, artificial
  Oligomer
acaguuuacagaaccucac

SEQ ID NO: 11543 - RNA, 19 nt, artificial
  Oligomer
cccaaaggaacaucaauag

SEQ ID NO: 11544 - RNA, 19 nt, artificial
  Oligomer
cuagaaaacuaaggaaagc

SEQ ID NO: 11545 - RNA, 19 nt, artificial
  Oligomer
agaaaacuaaggaaagcac

SEQ ID NO: 11546 - RNA, 19 nt, artificial
  Oligomer
agcacuuuuacuaaucgac

SEQ ID NO: 11547 - RNA, 19 nt, artificial
  Oligomer
gagaaaggaaaagcuuaag

SEQ ID NO: 11548 - RNA, 19 nt, artificial
  Oligomer
auaccaaccuuucuuucau

SEQ ID NO: 11549 - RNA, 19 nt, artificial
  Oligomer
uucaucaucuacugcauuu

SEQ ID NO: 11550 - RNA, 19 nt, artificial
  Oligomer
auuccuuguacaauguagu

SEQ ID NO: 11551 - RNA, 19 nt, artificial
  Oligomer
uuuguccuuugaucacaca

SEQ ID NO: 11552 - RNA, 19 nt, artificial
  Oligomer
gaaaucacaaagacugauc

SEQ ID NO: 11553 - RNA, 19 nt, artificial
  Oligomer
uucaauggcaacgcuucau

SEQ ID NO: 11554 - RNA, 19 nt, artificial
  Oligomer
gaaggucuuugcaaaguuc

SEQ ID NO: 11555 - RNA, 19 nt, artificial
  Oligomer
caacaaugcaguguaguuc

SEQ ID NO: 11556 - RNA, 19 nt, artificial
  Oligomer
acaaugcaguguaguucag

SEQ ID NO: 11557 - RNA, 19 nt, artificial
  Oligomer
gacauuuacaacagcaggc

SEQ ID NO: 11558 - RNA, 19 nt, artificial
  Oligomer
acagcaccaaucuccuuag

SEQ ID NO: 11559 - RNA, 19 nt, artificial
  Oligomer
aucccuaagaucaaguuua

SEQ ID NO: 11560 - RNA, 19 nt, artificial
  Oligomer
uuuucaaaugaugcaggac

SEQ ID NO: 11561 - RNA, 19 nt, artificial
  Oligomer
aaccucacagacccaaagg

SEQ ID NO: 11562 - RNA, 19 nt, artificial
  Oligomer
caauaggcaaagcgacuac

SEQ ID NO: 11563 - RNA, 19 nt, artificial
  Oligomer
uaaagcugcaacacaugau

SEQ ID NO: 11564 - RNA, 19 nt, artificial
  Oligomer
cauuuccugauaauaccaa

SEQ ID NO: 11565 - RNA, 19 nt, artificial
  Oligomer
uaccaaccuuucuuucauc

SEQ ID NO: 11566 - RNA, 19 nt, artificial
  Oligomer
accaaccuuucuuucauca

SEQ ID NO: 11567 - RNA, 19 nt, artificial
  Oligomer
uuccuuguacaauguagug

SEQ ID NO: 11568 - RNA, 19 nt, artificial
  Oligomer
uuguccuuugaucacacac

SEQ ID NO: 11569 - RNA, 19 nt, artificial
  Oligomer
guucuguucaaaaucuccg

SEQ ID NO: 11570 - RNA, 19 nt, artificial
  Oligomer
aaucacaaagacugaucca

SEQ ID NO: 11571 - RNA, 19 nt, artificial
  Oligomer
uacgcucacuccauuacag

SEQ ID NO: 11572 - RNA, 19 nt, artificial
  Oligomer
aacacgugcugcuaacuca

SEQ ID NO: 11573 - RNA, 19 nt, artificial
  Oligomer
aucaguaggcaaguuuuac

SEQ ID NO: 11574 - RNA, 19 nt, artificial
  Oligomer
gcgcuuuugaaaaauaagg

SEQ ID NO: 11575 - RNA, 19 nt, artificial
  Oligomer
acauuuacaacagcaggca

SEQ ID NO: 11576 - RNA, 19 nt, artificial
  Oligomer
uuuaucaucccuaagauca

SEQ ID NO: 11577 - RNA, 19 nt, artificial
  Oligomer
aacacuccacaauucugca

SEQ ID NO: 11578 - RNA, 19 nt, artificial
  Oligomer
uucugcaacugucaauuua

SEQ ID NO: 11579 - RNA, 19 nt, artificial
  Oligomer
cuguuguaguggcugaagg

SEQ ID NO: 11580 - RNA, 19 nt, artificial
  Oligomer
uguuguaguggcugaaggg

SEQ ID NO: 11581 - RNA, 19 nt, artificial
  Oligomer
agugaguuaaguuguacag

SEQ ID NO: 11582 - RNA, 19 nt, artificial
  Oligomer
agugauguuaagaagguuc

SEQ ID NO: 11583 - RNA, 19 nt, artificial
  Oligomer
gugauguuaagaagguuca

SEQ ID NO: 11584 - RNA, 19 nt, artificial
  Oligomer
auaaagcugcaacacauga

SEQ ID NO: 11585 - RNA, 19 nt, artificial
  Oligomer
ccuuugaucacacacaccc

SEQ ID NO: 11586 - RNA, 19 nt, artificial
  Oligomer
agaacuacauaggagagca

SEQ ID NO: 11587 - RNA, 19 nt, artificial
  Oligomer
acauaggagagcaaguguc

SEQ ID NO: 11588 - RNA, 19 nt, artificial
  Oligomer
aauaaggcuuuaagaaggc

SEQ ID NO: 11589 - RNA, 19 nt, artificial
  Oligomer
cugagacauuuacaacagc

SEQ ID NO: 11590 - RNA, 19 nt, artificial
  Oligomer
cagcaccaaucuccuuagc

SEQ ID NO: 11591 - RNA, 19 nt, artificial
  Oligomer
agcaccaaucuccuuagcc

SEQ ID NO: 11592 - RNA, 19 nt, artificial
  Oligomer
uaucaucccuaagaucaag

SEQ ID NO: 11593 - RNA, 19 nt, artificial
  Oligomer
aucaucccuaagaucaagu

SEQ ID NO: 11594 - RNA, 19 nt, artificial
  Oligomer
cauuagcaaaagaucaaug

SEQ ID NO: 11595 - RNA, 19 nt, artificial
  Oligomer
aauucuguuguaguggcug

SEQ ID NO: 11596 - RNA, 19 nt, artificial
  Oligomer
ucgccagugaguuaaguug

SEQ ID NO: 11597 - RNA, 19 nt, artificial
  Oligomer
uuuuauaauacaaggaggc

SEQ ID NO: 11598 - RNA, 19 nt, artificial
  Oligomer
gcuuaagaaaacauuuccu

SEQ ID NO: 11599 - RNA, 19 nt, artificial
  Oligomer
cacagcuaaacagaauucu

SEQ ID NO: 11600 - RNA, 19 nt, artificial
  Oligomer
aguucuguucaaaaucucc

SEQ ID NO: 11601 - RNA, 19 nt, artificial
  Oligomer
aucacaaagacugauccaa

SEQ ID NO: 11602 - RNA, 19 nt, artificial
  Oligomer
cuccauuacaguacaaugu

SEQ ID NO: 11603 - RNA, 19 nt, artificial
  Oligomer
caguacaauguuaugucgg

SEQ ID NO: 11604 - RNA, 19 nt, artificial
  Oligomer
acgugcugcuaacucacug

SEQ ID NO: 11605 - RNA, 19 nt, artificial
  Oligomer
cuacauaggagagcaagug

SEQ ID NO: 11606 - RNA, 19 nt, artificial
  Oligomer
ugagacauuuacaacagca

SEQ ID NO: 11607 - RNA, 19 nt, artificial
  Oligomer
aauaggcaaagcgacuaca

SEQ ID NO: 11608 - RNA, 19 nt, artificial
  Oligomer
ugcaacacaugauuuuuac

SEQ ID NO: 11609 - RNA, 19 nt, artificial
  Oligomer
cagcuaaacagaauucuuc

SEQ ID NO: 11610 - RNA, 19 nt, artificial
  Oligomer
caguucuguucaaaaucuc

SEQ ID NO: 11611 - RNA, 19 nt, artificial
  Oligomer
gacugauccaaagagcuga

SEQ ID NO: 11612 - RNA, 19 nt, artificial
  Oligomer
cugauccaaagagcugagc

SEQ ID NO: 11613 - RNA, 19 nt, artificial
  Oligomer
guacaauguuaugucggga

SEQ ID NO: 11614 - RNA, 19 nt, artificial
  Oligomer
auaggagagcaagugucug

SEQ ID NO: 11615 - RNA, 19 nt, artificial
  Oligomer
gagacauuuacaacagcag

SEQ ID NO: 11616 - RNA, 19 nt, artificial
  Oligomer
cuccagguauuuuacagca

SEQ ID NO: 11617 - RNA, 19 nt, artificial
  Oligomer
uccagguauuuuacagcac

SEQ ID NO: 11618 - RNA, 19 nt, artificial
  Oligomer
ucuguucaaaaucuccgca

SEQ ID NO: 11619 - RNA, 19 nt, artificial
  Oligomer
acugauccaaagagcugag

SEQ ID NO: 11620 - RNA, 19 nt, artificial
  Oligomer
uacaauguuaugucgggaa

SEQ ID NO: 11621 - RNA, 19 nt, artificial
  Oligomer
uucgucaaacacugucuug

SEQ ID NO: 11622 - RNA, 19 nt, artificial
  Oligomer
uacaugcaaaacauaaugc

SEQ ID NO: 11623 - RNA, 19 nt, artificial
  Oligomer
auaggcaaagcgacuacag

SEQ ID NO: 11624 - RNA, 19 nt, artificial
  Oligomer
cacacccacagcuaaacag

SEQ ID NO: 11625 - RNA, 19 nt, artificial
  Oligomer
uucaaaaucuccgcaaaag

SEQ ID NO: 11626 - RNA, 19 nt, artificial
  Oligomer
aagacugauccaaagagcu

SEQ ID NO: 11627 - RNA, 19 nt, artificial
  Oligomer
gcucacuccauuacaguac

SEQ ID NO: 11628 - RNA, 19 nt, artificial
  Oligomer
aauggcaacgcuucauucg

SEQ ID NO: 11629 - RNA, 19 nt, artificial
  Oligomer
uaguucagaagguauuuug

SEQ ID NO: 11630 - RNA, 19 nt, artificial
  Oligomer
aagguauuuuggcaacucu

SEQ ID NO: 11631 - RNA, 19 nt, artificial
  Oligomer
uaggcaaagcgacuacagg

SEQ ID NO: 11632 - RNA, 19 nt, artificial
  Oligomer
aagagggucaguauugguc

SEQ ID NO: 11633 - RNA, 19 nt, artificial
  Oligomer
agcuaaacagaauucuuca

SEQ ID NO: 11634 - RNA, 19 nt, artificial
  Oligomer
uucugcuuuacgcaucuga

SEQ ID NO: 11635 - RNA, 19 nt, artificial
  Oligomer
uucagaagguauuuuggca

SEQ ID NO: 11636 - RNA, 19 nt, artificial
  Oligomer
ucgucaaacacugucuuga

SEQ ID NO: 11637 - RNA, 19 nt, artificial
  Oligomer
augggagucagcuucuucu

SEQ ID NO: 11638 - RNA, 19 nt, artificial
  Oligomer
uucaccgguuuuccaucua

SEQ ID NO: 11639 - RNA, 19 nt, artificial
  Oligomer
ucaccgguuuuccaucuac

SEQ ID NO: 11640 - RNA, 19 nt, artificial
  Oligomer
uauuggucaagugacagug

SEQ ID NO: 11641 - RNA, 19 nt, artificial
  Oligomer
auuaaaugcccaauuuggg

SEQ ID NO: 11642 - RNA, 19 nt, artificial
  Oligomer
auggcaacgcuucauucgg

SEQ ID NO: 11643 - RNA, 19 nt, artificial
  Oligomer
auaaggcuuuaagaaggcu

SEQ ID NO: 11644 - RNA, 19 nt, artificial
  Oligomer
auuuucucuuccucuucuu

SEQ ID NO: 11645 - RNA, 19 nt, artificial
  Oligomer
gucagcuucuucuccuuca

SEQ ID NO: 11646 - RNA, 19 nt, artificial
  Oligomer
uaaguuguacagaacaucg

SEQ ID NO: 11647 - RNA, 19 nt, artificial
  Oligomer
uuuuacaccuaguuacuag

SEQ ID NO: 11648 - RNA, 19 nt, artificial
  Oligomer
aauuaaaugcccaauuugg

SEQ ID NO: 11649 - RNA, 19 nt, artificial
  Oligomer
aaagacugauccaaagagc

SEQ ID NO: 11650 - RNA, 19 nt, artificial
  Oligomer
uuugcaaaguucagugcuc

SEQ ID NO: 11651 - RNA, 19 nt, artificial
  Oligomer
uuuggcaacucuuaaucug

SEQ ID NO: 11652 - RNA, 19 nt, artificial
  Oligomer
aaggcuuuaagaaggcuug

SEQ ID NO: 11653 - RNA, 19 nt, artificial
  Oligomer
aacagcaggcauuuucucu

SEQ ID NO: 11654 - RNA, 19 nt, artificial
  Oligomer
cauuuucucuuccucuucu

SEQ ID NO: 11655 - RNA, 19 nt, artificial
  Oligomer
uuuucucuuccucuucuuc

SEQ ID NO: 11656 - RNA, 19 nt, artificial
  Oligomer
aaguuguacagaacaucgu

SEQ ID NO: 11657 - RNA, 19 nt, artificial
  Oligomer
aucgucagcacuagcacag

SEQ ID NO: 11658 - RNA, 19 nt, artificial
  Oligomer
uuuauaauacaaggaggca

SEQ ID NO: 11659 - RNA, 19 nt, artificial
  Oligomer
aguucagaagguauuuugg

SEQ ID NO: 11660 - RNA, 19 nt, artificial
  Oligomer
guucagaagguauuuuggc

SEQ ID NO: 11661 - RNA, 19 nt, artificial
  Oligomer
uuuuggcaacucuuaaucu

SEQ ID NO: 11662 - RNA, 19 nt, artificial
  Oligomer
cagcaggcauuuucucuuc

SEQ ID NO: 11663 - RNA, 19 nt, artificial
  Oligomer
uccuucaguuucucgaucg

SEQ ID NO: 11664 - RNA, 19 nt, artificial
  Oligomer
uuauaauacaaggaggcau

SEQ ID NO: 11665 - RNA, 19 nt, artificial
  Oligomer
aaagguuccaagggacagg

SEQ ID NO: 11666 - RNA, 19 nt, artificial
  Oligomer
cuucuccuucaguuucucg

SEQ ID NO: 11667 - RNA, 19 nt, artificial
  Oligomer
auucaccgguuuuccaucu

SEQ ID NO: 11668 - RNA, 19 nt, artificial
  Oligomer
uaaugcuaauugcauuagc

SEQ ID NO: 11669 - RNA, 19 nt, artificial
  Oligomer
cagacccaaaggaacauca

SEQ ID NO: 11670 - RNA, 19 nt, artificial
  Oligomer
uuggucaagugacaguguc

SEQ ID NO: 11671 - RNA, 19 nt, artificial
  Oligomer
guccuuugaucacacacac

SEQ ID NO: 11672 - RNA, 19 nt, artificial
  Oligomer
aucuccgcaaaagcugguc

SEQ ID NO: 11673 - RNA, 19 nt, artificial
  Oligomer
aaagagcugagcugcuacg

SEQ ID NO: 11674 - RNA, 19 nt, artificial
  Oligomer
ucacuggugaguucaaugg

SEQ ID NO: 11675 - RNA, 19 nt, artificial
  Oligomer
gugaguucaauggcaacgc

SEQ ID NO: 11676 - RNA, 19 nt, artificial
  Oligomer
ucuuugcaaaguucagugc

SEQ ID NO: 11677 - RNA, 19 nt, artificial
  Oligomer
uaaggcuuuaagaaggcuu

SEQ ID NO: 11678 - RNA, 19 nt, artificial
  Oligomer
uuaguucccacuaggauga

SEQ ID NO: 11679 - RNA, 19 nt, artificial
  Oligomer
augcaggacucacaaggga

SEQ ID NO: 11680 - RNA, 19 nt, artificial
  Oligomer
acaugcaaaacauaaugcu

SEQ ID NO: 11681 - RNA, 19 nt, artificial
  Oligomer
uuaaguuguacagaacauc

SEQ ID NO: 11682 - RNA, 19 nt, artificial
  Oligomer
guauuggucaagugacagu

SEQ ID NO: 11683 - RNA, 19 nt, artificial
  Oligomer
uuggcaacucuuaaucuga

SEQ ID NO: 11684 - RNA, 19 nt, artificial
  Oligomer
caguaggcaaguuuuaccu

SEQ ID NO: 11685 - RNA, 19 nt, artificial
  Oligomer
aagguuccaagggacagga

SEQ ID NO: 11686 - RNA, 19 nt, artificial
  Oligomer
guucccacuaggaugaugg

SEQ ID NO: 11687 - RNA, 19 nt, artificial
  Oligomer
auucucgccagugaguuaa

SEQ ID NO: 11688 - RNA, 19 nt, artificial
  Oligomer
aacaucgucagcacuagca

SEQ ID NO: 11689 - RNA, 19 nt, artificial
  Oligomer
auuggucaagugacagugu

SEQ ID NO: 11690 - RNA, 19 nt, artificial
  Oligomer
uggucaagugacagugucg

SEQ ID NO: 11691 - RNA, 19 nt, artificial
  Oligomer
uaaucuggcaagacaguga

SEQ ID NO: 11692 - RNA, 19 nt, artificial
  Oligomer
gugacacuuucauuccuug

SEQ ID NO: 11693 - RNA, 19 nt, artificial
  Oligomer
uuguguaacugaucaguag

SEQ ID NO: 11694 - RNA, 19 nt, artificial
  Oligomer
guguaacugaucaguaggc

SEQ ID NO: 11695 - RNA, 19 nt, artificial
  Oligomer
uaggagagcaagugucugc

SEQ ID NO: 11696 - RNA, 19 nt, artificial
  Oligomer
aauagaaugugagucugaa

SEQ ID NO: 11697 - RNA, 19 nt, artificial
  Oligomer
ugauugguucaaaaaaugg

SEQ ID NO: 11698 - RNA, 19 nt, artificial
  Oligomer
aaguuggcauugagugcga

SEQ ID NO: 11699 - RNA, 19 nt, artificial
  Oligomer
uccuuagccauggcuagac

SEQ ID NO: 11700 - RNA, 19 nt, artificial
  Oligomer
cuaagaucaaguuuaguuc

SEQ ID NO: 11701 - RNA, 19 nt, artificial
  Oligomer
aaguuuaguucccacuagg

SEQ ID NO: 11702 - RNA, 19 nt, artificial
  Oligomer
cuaauugcauuagcaaaag

SEQ ID NO: 11703 - RNA, 19 nt, artificial
  Oligomer
uuuacaccuaguuacuaga

SEQ ID NO: 11704 - RNA, 19 nt, artificial
  Oligomer
aucuacugcauuugacaga

SEQ ID NO: 11705 - RNA, 19 nt, artificial
  Oligomer
aaaaucuccgcaaaagcug

SEQ ID NO: 11706 - RNA, 19 nt, artificial
  Oligomer
uaacugaucaguaggcaag

SEQ ID NO: 11707 - RNA, 19 nt, artificial
  Oligomer
cgcuuuugaaaaauaaggc

SEQ ID NO: 11708 - RNA, 19 nt, artificial
  Oligomer
aggcuugucauuuuagggc

SEQ ID NO: 11709 - RNA, 19 nt, artificial
  Oligomer
uaauagaaugugagucuga

SEQ ID NO: 11710 - RNA, 19 nt, artificial
  Oligomer
aaugcuaauugcauuagca

SEQ ID NO: 11711 - RNA, 19 nt, artificial
  Oligomer
cuucauuagaggaaauagc

SEQ ID NO: 11712 - RNA, 19 nt, artificial
  Oligomer
aaauagcaguucuguucaa

SEQ ID NO: 11713 - RNA, 19 nt, artificial
  Oligomer
ucuccgcaaaagcugguca

SEQ ID NO: 11714 - RNA, 19 nt, artificial
  Oligomer
caaagacugauccaaagag

SEQ ID NO: 11715 - RNA, 19 nt, artificial
  Oligomer
gcuuuaagaaggcuuguca

SEQ ID NO: 11716 - RNA, 19 nt, artificial
  Oligomer
aaggcuugucauuuuaggg

SEQ ID NO: 11717 - RNA, 19 nt, artificial
  Oligomer
augugagucugaacucuua

SEQ ID NO: 11718 - RNA, 19 nt, artificial
  Oligomer
aaaguuggcauugagugcg

SEQ ID NO: 11719 - RNA, 19 nt, artificial
  Oligomer
gauaggugaugggagucag

SEQ ID NO: 11720 - RNA, 19 nt, artificial
  Oligomer
auaggugaugggagucagc

SEQ ID NO: 11721 - RNA, 19 nt, artificial
  Oligomer
gaaauagcaguucuguuca

SEQ ID NO: 11722 - RNA, 19 nt, artificial
  Oligomer
aaaucuccgcaaaagcugg

SEQ ID NO: 11723 - RNA, 19 nt, artificial
  Oligomer
cacuggugaguucaauggc

SEQ ID NO: 11724 - RNA, 19 nt, artificial
  Oligomer
ugaguucaauggcaacgcu

SEQ ID NO: 11725 - RNA, 19 nt, artificial
  Oligomer
gucuucucaaagacgaagg

SEQ ID NO: 11726 - RNA, 19 nt, artificial
  Oligomer
uucucaaagacgaaggucu

SEQ ID NO: 11727 - RNA, 19 nt, artificial
  Oligomer
caaagacgaaggucuuugc

SEQ ID NO: 11728 - RNA, 19 nt, artificial
  Oligomer
gcuuuugaaaaauaaggcu

SEQ ID NO: 11729 - RNA, 19 nt, artificial
  Oligomer
caaucuccuuagccauggc

SEQ ID NO: 11730 - RNA, 19 nt, artificial
  Oligomer
aaucuccuuagccauggcu

SEQ ID NO: 11731 - RNA, 19 nt, artificial
  Oligomer
caaguuuaguucccacuag

SEQ ID NO: 11732 - RNA, 19 nt, artificial
  Oligomer
aagacagugauguuaagaa

SEQ ID NO: 11733 - RNA, 19 nt, artificial
  Oligomer
aaucuccgcaaaagcuggu

SEQ ID NO: 11734 - RNA, 19 nt, artificial
  Oligomer
agcuggucagaaaacucgc

SEQ ID NO: 11735 - RNA, 19 nt, artificial
  Oligomer
acuggugaguucaauggca

SEQ ID NO: 11736 - RNA, 19 nt, artificial
  Oligomer
aaggucuuugcaaaguuca

SEQ ID NO: 11737 - RNA, 19 nt, artificial
  Oligomer
guucucggcacaacaaugc

SEQ ID NO: 11738 - RNA, 19 nt, artificial
  Oligomer
ucucggcacaacaaugcag

SEQ ID NO: 11739 - RNA, 19 nt, artificial
  Oligomer
ucccuaagaucaaguuuag

SEQ ID NO: 11740 - RNA, 19 nt, artificial
  Oligomer
uuguaguggcugaaggguc

SEQ ID NO: 11741 - RNA, 19 nt, artificial
  Oligomer
guuguacagaacaucguca

SEQ ID NO: 11742 - RNA, 19 nt, artificial
  Oligomer
aaucuggcaagacagugau

SEQ ID NO: 11743 - RNA, 19 nt, artificial
  Oligomer
caaggaggcauauugcuca

SEQ ID NO: 11744 - RNA, 19 nt, artificial
  Oligomer
agaggaaauagcaguucug

SEQ ID NO: 11745 - RNA, 19 nt, artificial
  Oligomer
uuaugucgggaacacgugc

SEQ ID NO: 11746 - RNA, 19 nt, artificial
  Oligomer
uaugucgggaacacgugcu

SEQ ID NO: 11747 - RNA, 19 nt, artificial
  Oligomer
uagaaugugagucugaacu

SEQ ID NO: 11748 - RNA, 19 nt, artificial
  Oligomer
cagaauucuucauuagagg

SEQ ID NO: 11749 - RNA, 19 nt, artificial
  Oligomer
uaacucacuggugaguuca

SEQ ID NO: 11750 - RNA, 19 nt, artificial
  Oligomer
uacauaggagagcaagugu

SEQ ID NO: 11751 - RNA, 19 nt, artificial
  Oligomer
ucuucucaaagacgaaggu

SEQ ID NO: 11752 - RNA, 19 nt, artificial
  Oligomer
ucaaagacgaaggucuuug

SEQ ID NO: 11753 - RNA, 19 nt, artificial
  Oligomer
aaagacgaaggucuuugca

SEQ ID NO: 11754 - RNA, 19 nt, artificial
  Oligomer
gaaugugagucugaacucu

SEQ ID NO: 11755 - RNA, 19 nt, artificial
  Oligomer
uugcauuagcaaaagauca

SEQ ID NO: 11756 - RNA, 19 nt, artificial
  Oligomer
aaacuaaggaaagcacuua

SEQ ID NO: 11757 - RNA, 19 nt, artificial
  Oligomer
uacaaggaggcauauugcu

SEQ ID NO: 11758 - RNA, 19 nt, artificial
  Oligomer
acagaauucuucauuagag

SEQ ID NO: 11759 - RNA, 19 nt, artificial
  Oligomer
gugcugcuaacucacuggu

SEQ ID NO: 11760 - RNA, 19 nt, artificial
  Oligomer
uguaacugaucaguaggca

SEQ ID NO: 11761 - RNA, 19 nt, artificial
  Oligomer
uaccgucuucucaaagacg

SEQ ID NO: 11762 - RNA, 19 nt, artificial
  Oligomer
accgucuucucaaagacga

SEQ ID NO: 11763 - RNA, 19 nt, artificial
  Oligomer
uuggcauugagugcgaagg

SEQ ID NO: 11764 - RNA, 19 nt, artificial
  Oligomer
uuagccauggcuagacccu

SEQ ID NO: 11765 - RNA, 19 nt, artificial
  Oligomer
acagugucgguaaucuggc

SEQ ID NO: 11766 - RNA, 19 nt, artificial
  Oligomer
acagugauguuaagaaggu

SEQ ID NO: 11767 - RNA, 19 nt, artificial
  Oligomer
aaggaggcauauugcucag

SEQ ID NO: 11768 - RNA, 19 nt, artificial
  Oligomer
ggaaauagcaguucuguuc

SEQ ID NO: 11769 - RNA, 19 nt, artificial
  Oligomer
aauguuaugucgggaacac

SEQ ID NO: 11770 - RNA, 19 nt, artificial
  Oligomer
cuaacucacuggugaguuc

SEQ ID NO: 11771 - RNA, 19 nt, artificial
  Oligomer
aggagagcaagugucugca

SEQ ID NO: 11772 - RNA, 19 nt, artificial
  Oligomer
cuaccgucuucucaaagac

SEQ ID NO: 11773 - RNA, 19 nt, artificial
  Oligomer
gugacagugucgguaaucu

SEQ ID NO: 11774 - RNA, 19 nt, artificial
  Oligomer
gacagugucgguaaucugg

SEQ ID NO: 11775 - RNA, 19 nt, artificial
  Oligomer
gaauucuucauuagaggaa

SEQ ID NO: 11776 - RNA, 19 nt, artificial
  Oligomer
auccaaagagcugagcugc

SEQ ID NO: 11777 - RNA, 19 nt, artificial
  Oligomer
auguuaugucgggaacacg

SEQ ID NO: 11778 - RNA, 19 nt, artificial
  Oligomer
uucucggcacaacaaugca

SEQ ID NO: 11779 - RNA, 19 nt, artificial
  Oligomer
uuccaagggacaggaccaa

SEQ ID NO: 11780 - RNA, 19 nt, artificial
  Oligomer
cagugucgguaaucuggca

SEQ ID NO: 11781 - RNA, 19 nt, artificial
  Oligomer
gauccaaagagcugagcug

SEQ ID NO: 11782 - RNA, 19 nt, artificial
  Oligomer
auugagugcgaaggcucca

SEQ ID NO: 11783 - RNA, 19 nt, artificial
  Oligomer
ucuggcaagacagugaugu

SEQ ID NO: 11784 - RNA, 19 nt, artificial
  Oligomer
agacagugauguuaagaag

SEQ ID NO: 11785 - RNA, 19 nt, artificial
  Oligomer
uucccacuaggaugauggg

SEQ ID NO: 11786 - RNA, 19 nt, artificial
  Oligomer
aucgugucuuuaucauccc

SEQ ID NO: 11787 - RNA, 19 nt, artificial
  Oligomer
agguauuuuacagcaccaa

SEQ ID NO: 11788 - RNA, 19 nt, artificial
  Oligomer
ggaugaaaaucaggcucuu

SEQ ID NO: 11789 - RNA, 19 nt, artificial
  Oligomer
ggcugggaauaaauuuuua

SEQ ID NO: 11790 - RNA, 19 nt, artificial
  Oligomer
cgaggacacuucaaaagau

SEQ ID NO: 11791 - RNA, 19 nt, artificial
  Oligomer
ccaacuggaacaaugaguu

SEQ ID NO: 11792 - RNA, 19 nt, artificial
  Oligomer
ucaauuuucuggcaaggaa

SEQ ID NO: 11793 - RNA, 19 nt, artificial
  Oligomer
uggcugggaauaaauuuuu

SEQ ID NO: 11794 - RNA, 19 nt, artificial
  Oligomer
gggaugaaaaucaggcucu

SEQ ID NO: 11795 - RNA, 19 nt, artificial
  Oligomer
uggcuuuagucuugaucau

SEQ ID NO: 11796 - RNA, 19 nt, artificial
  Oligomer
ggaggcaauuagacaaaaa

SEQ ID NO: 11797 - RNA, 19 nt, artificial
  Oligomer
cgaguuauuuuggguucaa

SEQ ID NO: 11798 - RNA, 19 nt, artificial
  Oligomer
gccugaauuuuaacugcau

SEQ ID NO: 11799 - RNA, 19 nt, artificial
  Oligomer
cacuauaccauacuuccuu

SEQ ID NO: 11800 - RNA, 19 nt, artificial
  Oligomer
cacuuucugaguuaucaua

SEQ ID NO: 11801 - RNA, 19 nt, artificial
  Oligomer
gcaacaaguaucaugaugg

SEQ ID NO: 11802 - RNA, 19 nt, artificial
  Oligomer
uccuggaacuucacaugaa

SEQ ID NO: 11803 - RNA, 19 nt, artificial
  Oligomer
ucgucuucuuucucagccu

SEQ ID NO: 11804 - RNA, 19 nt, artificial
  Oligomer
auguuuucaucgucuucuu

SEQ ID NO: 11805 - RNA, 19 nt, artificial
  Oligomer
cucuggcuuuagucuugau

SEQ ID NO: 11806 - RNA, 19 nt, artificial
  Oligomer
ccacugaauugcuaaggac

SEQ ID NO: 11807 - RNA, 19 nt, artificial
  Oligomer
acaacaaggagagcuucua

SEQ ID NO: 11808 - RNA, 19 nt, artificial
  Oligomer
agguguucauuucuauuac

SEQ ID NO: 11809 - RNA, 19 nt, artificial
  Oligomer
cgcugcucuucugaaaucu

SEQ ID NO: 11810 - RNA, 19 nt, artificial
  Oligomer
gcccuuacuaacgacccaa

SEQ ID NO: 11811 - RNA, 19 nt, artificial
  Oligomer
ccauacuuccuuagcuuau

SEQ ID NO: 11812 - RNA, 19 nt, artificial
  Oligomer
cggcugggaugaaaaucag

SEQ ID NO: 11813 - RNA, 19 nt, artificial
  Oligomer
caagagcuuuugagugguu

SEQ ID NO: 11814 - RNA, 19 nt, artificial
  Oligomer
cugcucuucugaaaucuau

SEQ ID NO: 11815 - RNA, 19 nt, artificial
  Oligomer
cccugacagauguauuuca

SEQ ID NO: 11816 - RNA, 19 nt, artificial
  Oligomer
caacaaguaucaugauggg

SEQ ID NO: 11817 - RNA, 19 nt, artificial
  Oligomer
agcaacaaguaucaugaug

SEQ ID NO: 11818 - RNA, 19 nt, artificial
  Oligomer
gccgaagagcaacaaguau

SEQ ID NO: 11819 - RNA, 19 nt, artificial
  Oligomer
ucaucgucuucuuucucag

SEQ ID NO: 11820 - RNA, 19 nt, artificial
  Oligomer
ggcuuuagucuugaucaug

SEQ ID NO: 11821 - RNA, 19 nt, artificial
  Oligomer
gcacugugccugaauuuua

SEQ ID NO: 11822 - RNA, 19 nt, artificial
  Oligomer
cuauaccauacuuccuuag

SEQ ID NO: 11823 - RNA, 19 nt, artificial
  Oligomer
gcaguauuggcguguucuu

SEQ ID NO: 11824 - RNA, 19 nt, artificial
  Oligomer
caaugaguucaagcagauu

SEQ ID NO: 11825 - RNA, 19 nt, artificial
  Oligomer
gacgugauuacaggcuuaa

SEQ ID NO: 11826 - RNA, 19 nt, artificial
  Oligomer
cucuucacauagcuuuaca

SEQ ID NO: 11827 - RNA, 19 nt, artificial
  Oligomer
ugggaugaaaaucaggcuc

SEQ ID NO: 11828 - RNA, 19 nt, artificial
  Oligomer
ccggcugggaugaaaauca

SEQ ID NO: 11829 - RNA, 19 nt, artificial
  Oligomer
ucacuuucugaguuaucau

SEQ ID NO: 11830 - RNA, 19 nt, artificial
  Oligomer
cuauaugguacaaaugcag

SEQ ID NO: 11831 - RNA, 19 nt, artificial
  Oligomer
ccuucgcugcucuucugaa

SEQ ID NO: 11832 - RNA, 19 nt, artificial
  Oligomer
cccaggaagacuuuuucag

SEQ ID NO: 11833 - RNA, 19 nt, artificial
  Oligomer
agagcaacaaguaucauga

SEQ ID NO: 11834 - RNA, 19 nt, artificial
  Oligomer
ccgaagagcaacaaguauc

SEQ ID NO: 11835 - RNA, 19 nt, artificial
  Oligomer
cggcuuggaaauggauuuu

SEQ ID NO: 11836 - RNA, 19 nt, artificial
  Oligomer
acaaacacaaccacugaau

SEQ ID NO: 11837 - RNA, 19 nt, artificial
  Oligomer
gcauuucuucaaccuggaa

SEQ ID NO: 11838 - RNA, 19 nt, artificial
  Oligomer
accucagauuucacaaacu

SEQ ID NO: 11839 - RNA, 19 nt, artificial
  Oligomer
agacaaaaaccucagauuu

SEQ ID NO: 11840 - RNA, 19 nt, artificial
  Oligomer
ucauaagaggaacaaguau

SEQ ID NO: 11841 - RNA, 19 nt, artificial
  Oligomer
cugcaugcuaauucuaaua

SEQ ID NO: 11842 - RNA, 19 nt, artificial
  Oligomer
cccuuacuaacgacccaac

SEQ ID NO: 11843 - RNA, 19 nt, artificial
  Oligomer
acacgaguuauuuuggguu

SEQ ID NO: 11844 - RNA, 19 nt, artificial
  Oligomer
auggcugggaauaaauuuu

SEQ ID NO: 11845 - RNA, 19 nt, artificial
  Oligomer
ccaggcauuguguuuucaa

SEQ ID NO: 11846 - RNA, 19 nt, artificial
  Oligomer
agagguguucauuucuauu

SEQ ID NO: 11847 - RNA, 19 nt, artificial
  Oligomer
gaggacacuucaaaagaug

SEQ ID NO: 11848 - RNA, 19 nt, artificial
  Oligomer
cgugauuacaggcuuaaag

SEQ ID NO: 11849 - RNA, 19 nt, artificial
  Oligomer
cugggaugaaaaucaggcu

SEQ ID NO: 11850 - RNA, 19 nt, artificial
  Oligomer
gcaagagcuuuugaguggu

SEQ ID NO: 11851 - RNA, 19 nt, artificial
  Oligomer
ggauuuugaaugagggucu

SEQ ID NO: 11852 - RNA, 19 nt, artificial
  Oligomer
agcugagcaagguguauuu

SEQ ID NO: 11853 - RNA, 19 nt, artificial
  Oligomer
gcugcucuucugaaaucua

SEQ ID NO: 11854 - RNA, 19 nt, artificial
  Oligomer
ccugacagauguauuucac

SEQ ID NO: 11855 - RNA, 19 nt, artificial
  Oligomer
gaagagcaacaaguaucau

SEQ ID NO: 11856 - RNA, 19 nt, artificial
  Oligomer
cuggcgauuucaacaagaa

SEQ ID NO: 11857 - RNA, 19 nt, artificial
  Oligomer
ucggauuguucgaggccaa

SEQ ID NO: 11858 - RNA, 19 nt, artificial
  Oligomer
cgcauuucuucaaccugga

SEQ ID NO: 11859 - RNA, 19 nt, artificial
  Oligomer
aggaggcaauuagacaaaa

SEQ ID NO: 11860 - RNA, 19 nt, artificial
  Oligomer
gcaugcuaauucuaauacc

SEQ ID NO: 11861 - RNA, 19 nt, artificial
  Oligomer
cacugugccugaauuuuaa

SEQ ID NO: 11862 - RNA, 19 nt, artificial
  Oligomer
acguucuacugguaugaag

SEQ ID NO: 11863 - RNA, 19 nt, artificial
  Oligomer
cacguucuacugguaugaa

SEQ ID NO: 11864 - RNA, 19 nt, artificial
  Oligomer
gucauauacaacagaacaa

SEQ ID NO: 11865 - RNA, 19 nt, artificial
  Oligomer
ucauggcugggaauaaauu

SEQ ID NO: 11866 - RNA, 19 nt, artificial
  Oligomer
caggcauuguguuuucaau

SEQ ID NO: 11867 - RNA, 19 nt, artificial
  Oligomer
agagcuucuagacuuugga

SEQ ID NO: 11868 - RNA, 19 nt, artificial
  Oligomer
acgugauuacaggcuuaaa

SEQ ID NO: 11869 - RNA, 19 nt, artificial
  Oligomer
ggacgaaaauacugacgug

SEQ ID NO: 11870 - RNA, 19 nt, artificial
  Oligomer
cugaaaucuauaugguaca

SEQ ID NO: 11871 - RNA, 19 nt, artificial
  Oligomer
auaauuagguucuggcgau

SEQ ID NO: 11872 - RNA, 19 nt, artificial
  Oligomer
uuguaugcaugugaaagaa

SEQ ID NO: 11873 - RNA, 19 nt, artificial
  Oligomer
cccgugccucaauuuucug

SEQ ID NO: 11874 - RNA, 19 nt, artificial
  Oligomer
ugcacaacaucaccuucug

SEQ ID NO: 11875 - RNA, 19 nt, artificial
  Oligomer
cugcacaacaucaccuucu

SEQ ID NO: 11876 - RNA, 19 nt, artificial
  Oligomer
cucugcacaacaucaccuu

SEQ ID NO: 11877 - RNA, 19 nt, artificial
  Oligomer
gaaauuuccugacagccga

SEQ ID NO: 11878 - RNA, 19 nt, artificial
  Oligomer
gucucucucugcacaacau

SEQ ID NO: 11879 - RNA, 19 nt, artificial
  Oligomer
cacacaccauguuuucauc

SEQ ID NO: 11880 - RNA, 19 nt, artificial
  Oligomer
accacugaauugcuaagga

SEQ ID NO: 11881 - RNA, 19 nt, artificial
  Oligomer
ucguggcgcauuucuucaa

SEQ ID NO: 11882 - RNA, 19 nt, artificial
  Oligomer
gaggcaauuagacaaaaac

SEQ ID NO: 11883 - RNA, 19 nt, artificial
  Oligomer
cacgaguuauuuuggguuc

SEQ ID NO: 11884 - RNA, 19 nt, artificial
  Oligomer
cuacugguaugaagaggag

SEQ ID NO: 11885 - RNA, 19 nt, artificial
  Oligomer
acacguucuacugguauga

SEQ ID NO: 11886 - RNA, 19 nt, artificial
  Oligomer
cucauggcugggaauaaau

SEQ ID NO: 11887 - RNA, 19 nt, artificial
  Oligomer
ccacuuguauucaucagcu

SEQ ID NO: 11888 - RNA, 19 nt, artificial
  Oligomer
accauauuaguacucucau

SEQ ID NO: 11889 - RNA, 19 nt, artificial
  Oligomer
cugacgugauuacaggcuu

SEQ ID NO: 11890 - RNA, 19 nt, artificial
  Oligomer
cgggaugcaagagcuuuug

SEQ ID NO: 11891 - RNA, 19 nt, artificial
  Oligomer
cucuucugaaaucuauaug

SEQ ID NO: 11892 - RNA, 19 nt, artificial
  Oligomer
cuuguaugcaugugaaaga

SEQ ID NO: 11893 - RNA, 19 nt, artificial
  Oligomer
gucuuguaugcaugugaaa

SEQ ID NO: 11894 - RNA, 19 nt, artificial
  Oligomer
gaagaaauuuccugacagc

SEQ ID NO: 11895 - RNA, 19 nt, artificial
  Oligomer
uccuaugaguuguucuggu

SEQ ID NO: 11896 - RNA, 19 nt, artificial
  Oligomer
cucucuggcuuuagucuug

SEQ ID NO: 11897 - RNA, 19 nt, artificial
  Oligomer
ugaucucucuggcuuuagu

SEQ ID NO: 11898 - RNA, 19 nt, artificial
  Oligomer
cacaaacacaaccacugaa

SEQ ID NO: 11899 - RNA, 19 nt, artificial
  Oligomer
cccacaaacacaaccacug

SEQ ID NO: 11900 - RNA, 19 nt, artificial
  Oligomer
uagacaaaaaccucagauu

SEQ ID NO: 11901 - RNA, 19 nt, artificial
  Oligomer
uuagacaaaaaccucagau

SEQ ID NO: 11902 - RNA, 19 nt, artificial
  Oligomer
gucagucgaaaccuuauuu

SEQ ID NO: 11903 - RNA, 19 nt, artificial
  Oligomer
cuaauucuaauaccuguca

SEQ ID NO: 11904 - RNA, 19 nt, artificial
  Oligomer
ugcaugcuaauucuaauac

SEQ ID NO: 11905 - RNA, 19 nt, artificial
  Oligomer
ccugaauuuuaacugcaug

SEQ ID NO: 11906 - RNA, 19 nt, artificial
  Oligomer
acgaguuauuuuggguuca

SEQ ID NO: 11907 - RNA, 19 nt, artificial
  Oligomer
ugacacguucuacugguau

SEQ ID NO: 11908 - RNA, 19 nt, artificial
  Oligomer
cccagagguguucauuucu

SEQ ID NO: 11909 - RNA, 19 nt, artificial
  Oligomer
caccauauuaguacucuca

SEQ ID NO: 11910 - RNA, 19 nt, artificial
  Oligomer
gggacgaaaauacugacgu

SEQ ID NO: 11911 - RNA, 19 nt, artificial
  Oligomer
gguuugcugaucucuuacu

SEQ ID NO: 11912 - RNA, 19 nt, artificial
  Oligomer
ugcucuucugaaaucuaua

SEQ ID NO: 11913 - RNA, 19 nt, artificial
  Oligomer
gggugcuggauuuugaaug

SEQ ID NO: 11914 - RNA, 19 nt, artificial
  Oligomer
gcguggcuuuaaaauggcg

SEQ ID NO: 11915 - RNA, 19 nt, artificial
  Oligomer
ccuguggucuuguaugcau

SEQ ID NO: 11916 - RNA, 19 nt, artificial
  Oligomer
acaucaccuucuguagaga

SEQ ID NO: 11917 - RNA, 19 nt, artificial
  Oligomer
cuggugaucucucuggcuu

SEQ ID NO: 11918 - RNA, 19 nt, artificial
  Oligomer
gcgcauuucuucaaccugg

SEQ ID NO: 11919 - RNA, 19 nt, artificial
  Oligomer
cguggcgcauuucuucaac

SEQ ID NO: 11920 - RNA, 19 nt, artificial
  Oligomer
gcaauuagacaaaaaccuc

SEQ ID NO: 11921 - RNA, 19 nt, artificial
  Oligomer
acugcaugcuaauucuaau

SEQ ID NO: 11922 - RNA, 19 nt, artificial
  Oligomer
ugccugaauuuuaacugca

SEQ ID NO: 11923 - RNA, 19 nt, artificial
  Oligomer
gacacguucuacugguaug

SEQ ID NO: 11924 - RNA, 19 nt, artificial
  Oligomer
guccaggcauuguguuuuc

SEQ ID NO: 11925 - RNA, 19 nt, artificial
  Oligomer
ccuggaaacacggaugagu

SEQ ID NO: 11926 - RNA, 19 nt, artificial
  Oligomer
gcccugacagauguauuuc

SEQ ID NO: 11927 - RNA, 19 nt, artificial
  Oligomer
guucuggcgauuucaacaa

SEQ ID NO: 11928 - RNA, 19 nt, artificial
  Oligomer
uggucuuguaugcauguga

SEQ ID NO: 11929 - RNA, 19 nt, artificial
  Oligomer
ucggcuuggaaauggauuu

SEQ ID NO: 11930 - RNA, 19 nt, artificial
  Oligomer
caggugagggagaagaaau

SEQ ID NO: 11931 - RNA, 19 nt, artificial
  Oligomer
acaggugagggagaagaaa

SEQ ID NO: 11932 - RNA, 19 nt, artificial
  Oligomer
acaucguggcgcauuucuu

SEQ ID NO: 11933 - RNA, 19 nt, artificial
  Oligomer
caauuagacaaaaaccuca

SEQ ID NO: 11934 - RNA, 19 nt, artificial
  Oligomer
gcuaauucuaauaccuguc

SEQ ID NO: 11935 - RNA, 19 nt, artificial
  Oligomer
ugcuaauucuaauaccugu

SEQ ID NO: 11936 - RNA, 19 nt, artificial
  Oligomer
ugaauuuuaacugcaugcu

SEQ ID NO: 11937 - RNA, 19 nt, artificial
  Oligomer
gaguuauuuuggguucaac

SEQ ID NO: 11938 - RNA, 19 nt, artificial
  Oligomer
cacacgaguuauuuugggu

SEQ ID NO: 11939 - RNA, 19 nt, artificial
  Oligomer
guguucuucuguggaccua

SEQ ID NO: 11940 - RNA, 19 nt, artificial
  Oligomer
guauuggcguguucuucug

SEQ ID NO: 11941 - RNA, 19 nt, artificial
  Oligomer
acgaaaauacugacgugau

SEQ ID NO: 11942 - RNA, 19 nt, artificial
  Oligomer
cugaucucuuacucucccu

SEQ ID NO: 11943 - RNA, 19 nt, artificial
  Oligomer
gcuuuugagugguuugcug

SEQ ID NO: 11944 - RNA, 19 nt, artificial
  Oligomer
aagagcuuuugagugguuu

SEQ ID NO: 11945 - RNA, 19 nt, artificial
  Oligomer
gggaugcaagagcuuuuga

SEQ ID NO: 11946 - RNA, 19 nt, artificial
  Oligomer
cuacuggauuugccgggau

SEQ ID NO: 11947 - RNA, 19 nt, artificial
  Oligomer
uggugaucucucuggcuuu

SEQ ID NO: 11948 - RNA, 19 nt, artificial
  Oligomer
caaccacugaauugcuaag

SEQ ID NO: 11949 - RNA, 19 nt, artificial
  Oligomer
cacaggugagggagaagaa

SEQ ID NO: 11950 - RNA, 19 nt, artificial
  Oligomer
acacaggugagggagaaga

SEQ ID NO: 11951 - RNA, 19 nt, artificial
  Oligomer
caugcuaauucuaauaccu

SEQ ID NO: 11952 - RNA, 19 nt, artificial
  Oligomer
augaagaggaggagucuuu

SEQ ID NO: 11953 - RNA, 19 nt, artificial
  Oligomer
cugguaugaagaggaggag

SEQ ID NO: 11954 - RNA, 19 nt, artificial
  Oligomer
uugacacguucuacuggua

SEQ ID NO: 11955 - RNA, 19 nt, artificial
  Oligomer
uguuuauugacacguucua

SEQ ID NO: 11956 - RNA, 19 nt, artificial
  Oligomer
gacggccuguugauaugag

SEQ ID NO: 11957 - RNA, 19 nt, artificial
  Oligomer
uccaggcauuguguuuuca

SEQ ID NO: 11958 - RNA, 19 nt, artificial
  Oligomer
uucaaaagaugugccacuu

SEQ ID NO: 11959 - RNA, 19 nt, artificial
  Oligomer
agcuuuacacugggacgaa

SEQ ID NO: 11960 - RNA, 19 nt, artificial
  Oligomer
gcuuuaaaauggcgccagg

SEQ ID NO: 11961 - RNA, 19 nt, artificial
  Oligomer
caagaaguugucauuacca

SEQ ID NO: 11962 - RNA, 19 nt, artificial
  Oligomer
acaagaaguugucauuacc

SEQ ID NO: 11963 - RNA, 19 nt, artificial
  Oligomer
guggucuuguaugcaugug

SEQ ID NO: 11964 - RNA, 19 nt, artificial
  Oligomer
cgucuucuuucucagccug

SEQ ID NO: 11965 - RNA, 19 nt, artificial
  Oligomer
gguaugaagaggaggaguc

SEQ ID NO: 11966 - RNA, 19 nt, artificial
  Oligomer
cuguugauaugagcuccca

SEQ ID NO: 11967 - RNA, 19 nt, artificial
  Oligomer
gccuguugauaugagcucc

SEQ ID NO: 11968 - RNA, 19 nt, artificial
  Oligomer
aguccaggcauuguguuuu

SEQ ID NO: 11969 - RNA, 19 nt, artificial
  Oligomer
gacgaaaauacugacguga

SEQ ID NO: 11970 - RNA, 19 nt, artificial
  Oligomer
ugaucucuuacucucccug

SEQ ID NO: 11971 - RNA, 19 nt, artificial
  Oligomer
gaagcugagcaagguguau

SEQ ID NO: 11972 - RNA, 19 nt, artificial
  Oligomer
gugcuggauuuugaaugag

SEQ ID NO: 11973 - RNA, 19 nt, artificial
  Oligomer
ccucggcuuggaaauggau

SEQ ID NO: 11974 - RNA, 19 nt, artificial
  Oligomer
cuucuguagagaccgcuau

SEQ ID NO: 11975 - RNA, 19 nt, artificial
  Oligomer
ccuucuguagagaccgcua

SEQ ID NO: 11976 - RNA, 19 nt, artificial
  Oligomer
cagucucucucugcacaac

SEQ ID NO: 11977 - RNA, 19 nt, artificial
  Oligomer
cugugccugaauuuuaacu

SEQ ID NO: 11978 - RNA, 19 nt, artificial
  Oligomer
aucuguuuauugacacguu

SEQ ID NO: 11979 - RNA, 19 nt, artificial
  Oligomer
caaguccaggcauuguguu

SEQ ID NO: 11980 - RNA, 19 nt, artificial
  Oligomer
gucaaguccaggcauugug

SEQ ID NO: 11981 - RNA, 19 nt, artificial
  Oligomer
cacuuguauucaucagcug

SEQ ID NO: 11982 - RNA, 19 nt, artificial
  Oligomer
gccacuuguauucaucagc

SEQ ID NO: 11983 - RNA, 19 nt, artificial
  Oligomer
ugccacuuguauucaucag

SEQ ID NO: 11984 - RNA, 19 nt, artificial
  Oligomer
ucaaaagaugugccacuug

SEQ ID NO: 11985 - RNA, 19 nt, artificial
  Oligomer
ugaagcugagcaaggugua

SEQ ID NO: 11986 - RNA, 19 nt, artificial
  Oligomer
cuguggucuuguaugcaug

SEQ ID NO: 11987 - RNA, 19 nt, artificial
  Oligomer
ggcuuggaaauggauuuua

SEQ ID NO: 11988 - RNA, 19 nt, artificial
  Oligomer
caaguuauugauuccaaag

SEQ ID NO: 11989 - RNA, 19 nt, artificial
  Oligomer
gcauuguguuuucaaucaa

SEQ ID NO: 11990 - RNA, 19 nt, artificial
  Oligomer
augugccacuuguauucau

SEQ ID NO: 11991 - RNA, 19 nt, artificial
  Oligomer
aggcucuucacauagcuuu

SEQ ID NO: 11992 - RNA, 19 nt, artificial
  Oligomer
cacugaagcugagcaaggu

SEQ ID NO: 11993 - RNA, 19 nt, artificial
  Oligomer
cagggcaguacaucuuggu

SEQ ID NO: 11994 - RNA, 19 nt, artificial
  Oligomer
ggauuuuaggcccuguggu

SEQ ID NO: 11995 - RNA, 19 nt, artificial
  Oligomer
ccgggaugcaagagcuuuu

SEQ ID NO: 11996 - RNA, 19 nt, artificial
  Oligomer
gaaaaagcguggcuuuaaa

SEQ ID NO: 11997 - RNA, 19 nt, artificial
  Oligomer
uggaacuucacaugaaaaa

SEQ ID NO: 11998 - RNA, 19 nt, artificial
  Oligomer
cccuguggucuuguaugca

SEQ ID NO: 11999 - RNA, 19 nt, artificial
  Oligomer
uuccauuacacacgaguua

SEQ ID NO: 12000 - RNA, 19 nt, artificial
  Oligomer
ucuguuuauugacacguuc

SEQ ID NO: 12001 - RNA, 19 nt, artificial
  Oligomer
agaugugccacuuguauuc

SEQ ID NO: 12002 - RNA, 19 nt, artificial
  Oligomer
ggcccaacuggaacaauga

SEQ ID NO: 12003 - RNA, 19 nt, artificial
  Oligomer
acaggcuuaaagcagaaga

SEQ ID NO: 12004 - RNA, 19 nt, artificial
  Oligomer
gcgauuucaacaagaaguu

SEQ ID NO: 12005 - RNA, 19 nt, artificial
  Oligomer
gguacacacaccauguuuu

SEQ ID NO: 12006 - RNA, 19 nt, artificial
  Oligomer
acuggaacaaugaguucaa

SEQ ID NO: 12007 - RNA, 19 nt, artificial
  Oligomer
caggcuuaaagcagaagac

SEQ ID NO: 12008 - RNA, 19 nt, artificial
  Oligomer
caggcucuucacauagcuu

SEQ ID NO: 12009 - RNA, 19 nt, artificial
  Oligomer
ggaugcaagagcuuuugag

SEQ ID NO: 12010 - RNA, 19 nt, artificial
  Oligomer
gacagccgaagagcaacaa

SEQ ID NO: 12011 - RNA, 19 nt, artificial
  Oligomer
cuaugggauagcuguuaau

SEQ ID NO: 12012 - RNA, 19 nt, artificial
  Oligomer
ccuaugggauagcuguuaa

SEQ ID NO: 12013 - RNA, 19 nt, artificial
  Oligomer
gucgaaaccuuauuucauu

SEQ ID NO: 12014 - RNA, 19 nt, artificial
  Oligomer
ggcauuguguuuucaauca

SEQ ID NO: 12015 - RNA, 19 nt, artificial
  Oligomer
agguguauuucuacuggau

SEQ ID NO: 12016 - RNA, 19 nt, artificial
  Oligomer
gcaagguguauuucuacug

SEQ ID NO: 12017 - RNA, 19 nt, artificial
  Oligomer
ggaagacuuuuucagcgug

SEQ ID NO: 12018 - RNA, 19 nt, artificial
  Oligomer
gccucaauuuucuggcaag

SEQ ID NO: 12019 - RNA, 19 nt, artificial
  Oligomer
ggccuccuaugaguuguuc

SEQ ID NO: 12020 - RNA, 19 nt, artificial
  Oligomer
aggccuccuaugaguuguu

SEQ ID NO: 12021 - RNA, 19 nt, artificial
  Oligomer
gaauugcuaaggacaauag

SEQ ID NO: 12022 - RNA, 19 nt, artificial
  Oligomer
cccaacuggaacaaugagu

SEQ ID NO: 12023 - RNA, 19 nt, artificial
  Oligomer
uuacaggcuuaaagcagaa

SEQ ID NO: 12024 - RNA, 19 nt, artificial
  Oligomer
ggcucuucacauagcuuua

SEQ ID NO: 12025 - RNA, 19 nt, artificial
  Oligomer
ucaggcucuucacauagcu

SEQ ID NO: 12026 - RNA, 19 nt, artificial
  Oligomer
caaaugcagugaggcacag

SEQ ID NO: 12027 - RNA, 19 nt, artificial
  Oligomer
ggaacuucacaugaaaaag

SEQ ID NO: 12028 - RNA, 19 nt, artificial
  Oligomer
ccuggaacuucacaugaaa

SEQ ID NO: 12029 - RNA, 19 nt, artificial
  Oligomer
gcuuggaaauggauuuuag

SEQ ID NO: 12030 - RNA, 19 nt, artificial
  Oligomer
ugccucaauuuucuggcaa

SEQ ID NO: 12031 - RNA, 19 nt, artificial
  Oligomer
ucauucauaagaggaacaa

SEQ ID NO: 12032 - RNA, 19 nt, artificial
  Oligomer
ccgcacugugccugaauuu

SEQ ID NO: 12033 - RNA, 19 nt, artificial
  Oligomer
ggagucuuuccauuacaca

SEQ ID NO: 12034 - RNA, 19 nt, artificial
  Oligomer
guacacuauaccauacuuc

SEQ ID NO: 12035 - RNA, 19 nt, artificial
  Oligomer
aguacacuauaccauacuu

SEQ ID NO: 12036 - RNA, 19 nt, artificial
  Oligomer
caguacacuauaccauacu

SEQ ID NO: 12037 - RNA, 19 nt, artificial
  Oligomer
ucuagacuuuggaggucaa

SEQ ID NO: 12038 - RNA, 19 nt, artificial
  Oligomer
caagcagauugccuacaau

SEQ ID NO: 12039 - RNA, 19 nt, artificial
  Oligomer
gaggcccaacuggaacaau

SEQ ID NO: 12040 - RNA, 19 nt, artificial
  Oligomer
agggucucuccaccauauu

SEQ ID NO: 12041 - RNA, 19 nt, artificial
  Oligomer
agauguauuucacuaccca

SEQ ID NO: 12042 - RNA, 19 nt, artificial
  Oligomer
ugaaaaagcguggcuuuaa

SEQ ID NO: 12043 - RNA, 19 nt, artificial
  Oligomer
ggcgauuucaacaagaagu

SEQ ID NO: 12044 - RNA, 19 nt, artificial
  Oligomer
ugacagccgaagagcaaca

SEQ ID NO: 12045 - RNA, 19 nt, artificial
  Oligomer
accauguuuucaucgucuu

SEQ ID NO: 12046 - RNA, 19 nt, artificial
  Oligomer
acacacaccauguuuucau

SEQ ID NO: 12047 - RNA, 19 nt, artificial
  Oligomer
cugguacacacaccauguu

SEQ ID NO: 12048 - RNA, 19 nt, artificial
  Oligomer
cacuuuccaagcugggcaa

SEQ ID NO: 12049 - RNA, 19 nt, artificial
  Oligomer
uccgcacugugccugaauu

SEQ ID NO: 12050 - RNA, 19 nt, artificial
  Oligomer
gucuuuccauuacacacga

SEQ ID NO: 12051 - RNA, 19 nt, artificial
  Oligomer
ggacacuucaaaagaugug

SEQ ID NO: 12052 - RNA, 19 nt, artificial
  Oligomer
cucucgaggacacuucaaa

SEQ ID NO: 12053 - RNA, 19 nt, artificial
  Oligomer
gcagauugccuacaaucac

SEQ ID NO: 12054 - RNA, 19 nt, artificial
  Oligomer
uccaccauauuaguacucu

SEQ ID NO: 12055 - RNA, 19 nt, artificial
  Oligomer
ggaacaaugaguucaagca

SEQ ID NO: 12056 - RNA, 19 nt, artificial
  Oligomer
cuccaccauauuaguacuc

SEQ ID NO: 12057 - RNA, 19 nt, artificial
  Oligomer
gguguauuucuacuggauu

SEQ ID NO: 12058 - RNA, 19 nt, artificial
  Oligomer
cagccgaagagcaacaagu

SEQ ID NO: 12059 - RNA, 19 nt, artificial
  Oligomer
ccaaacccaagacagucuc

SEQ ID NO: 12060 - RNA, 19 nt, artificial
  Oligomer
ugaauugcuaaggacaaua

SEQ ID NO: 12061 - RNA, 19 nt, artificial
  Oligomer
cugaauugcuaaggacaau

SEQ ID NO: 12062 - RNA, 19 nt, artificial
  Oligomer
ggaacaaguauuugcugca

SEQ ID NO: 12063 - RNA, 19 nt, artificial
  Oligomer
aggagucuuuccauuacac

SEQ ID NO: 12064 - RNA, 19 nt, artificial
  Oligomer
agaggaggagucuuuccau

SEQ ID NO: 12065 - RNA, 19 nt, artificial
  Oligomer
ccaguugggaacuggugaa

SEQ ID NO: 12066 - RNA, 19 nt, artificial
  Oligomer
ccaccauauuaguacucuc

SEQ ID NO: 12067 - RNA, 19 nt, artificial
  Oligomer
gcccaacuggaacaaugag

SEQ ID NO: 12068 - RNA, 19 nt, artificial
  Oligomer
gcucuucacauagcuuuac

SEQ ID NO: 12069 - RNA, 19 nt, artificial
  Oligomer
cuagggaagcccuuacuaa

SEQ ID NO: 12070 - RNA, 19 nt, artificial
  Oligomer
cagauguauuucacuaccc

SEQ ID NO: 12071 - RNA, 19 nt, artificial
  Oligomer
aggaagacuuuuucagcgu

SEQ ID NO: 12072 - RNA, 19 nt, artificial
  Oligomer
ggaguccuggaacuucaca

SEQ ID NO: 12073 - RNA, 19 nt, artificial
  Oligomer
agagaccgcuaugcagaau

SEQ ID NO: 12074 - RNA, 19 nt, artificial
  Oligomer
acccaagacagucucucuc

SEQ ID NO: 12075 - RNA, 19 nt, artificial
  Oligomer
gccaaacccaagacagucu

SEQ ID NO: 12076 - RNA, 19 nt, artificial
  Oligomer
ccauguuuucaucgucuuc

SEQ ID NO: 12077 - RNA, 19 nt, artificial
  Oligomer
gccuccuaugaguuguucu

SEQ ID NO: 12078 - RNA, 19 nt, artificial
  Oligomer
accugucagucgaaaccuu

SEQ ID NO: 12079 - RNA, 19 nt, artificial
  Oligomer
uccauuacacacgaguuau

SEQ ID NO: 12080 - RNA, 19 nt, artificial
  Oligomer
cucgaggacacuucaaaag

SEQ ID NO: 12081 - RNA, 19 nt, artificial
  Oligomer
aggcccaacuggaacaaug

SEQ ID NO: 12082 - RNA, 19 nt, artificial
  Oligomer
uaaagcagaagaccuucua

SEQ ID NO: 12083 - RNA, 19 nt, artificial
  Oligomer
acauagcuuuacacuggga

SEQ ID NO: 12084 - RNA, 19 nt, artificial
  Oligomer
ucacauagcuuuacacugg

SEQ ID NO: 12085 - RNA, 19 nt, artificial
  Oligomer
gggaaaacucacuuucuga

SEQ ID NO: 12086 - RNA, 19 nt, artificial
  Oligomer
caagguguauuucuacugg

SEQ ID NO: 12087 - RNA, 19 nt, artificial
  Oligomer
guauuucacuacccagugu

SEQ ID NO: 12088 - RNA, 19 nt, artificial
  Oligomer
gacagauguauuucacuac

SEQ ID NO: 12089 - RNA, 19 nt, artificial
  Oligomer
gaacccucggcuuggaaau

SEQ ID NO: 12090 - RNA, 19 nt, artificial
  Oligomer
gugccucaauuuucuggca

SEQ ID NO: 12091 - RNA, 19 nt, artificial
  Oligomer
caccauguuuucaucgucu

SEQ ID NO: 12092 - RNA, 19 nt, artificial
  Oligomer
acaccauguuuucaucguc

SEQ ID NO: 12093 - RNA, 19 nt, artificial
  Oligomer
gaguuguucugguacacac

SEQ ID NO: 12094 - RNA, 19 nt, artificial
  Oligomer
caacugaguucaucagaca

SEQ ID NO: 12095 - RNA, 19 nt, artificial
  Oligomer
ugaccucgucaacugaguu

SEQ ID NO: 12096 - RNA, 19 nt, artificial
  Oligomer
uccacaucguggcgcauuu

SEQ ID NO: 12097 - RNA, 19 nt, artificial
  Oligomer
gggauagcuguuaaugcaa

SEQ ID NO: 12098 - RNA, 19 nt, artificial
  Oligomer
ggcaauuagacaaaaaccu

SEQ ID NO: 12099 - RNA, 19 nt, artificial
  Oligomer
cuggaacaaugaguucaag

SEQ ID NO: 12100 - RNA, 19 nt, artificial
  Oligomer
ggcuuaaagcagaagaccu

SEQ ID NO: 12101 - RNA, 19 nt, artificial
  Oligomer
cucuuacucucccuggaaa

SEQ ID NO: 12102 - RNA, 19 nt, artificial
  Oligomer
gaagacuuuuucagcgugc

SEQ ID NO: 12103 - RNA, 19 nt, artificial
  Oligomer
gccauaucuucgcuggagu

SEQ ID NO: 12104 - RNA, 19 nt, artificial
  Oligomer
ggcuuuaaaauggcgccag

SEQ ID NO: 12105 - RNA, 19 nt, artificial
  Oligomer
cuggaacuucacaugaaaa

SEQ ID NO: 12106 - RNA, 19 nt, artificial
  Oligomer
ccaagacagucucucucug

SEQ ID NO: 12107 - RNA, 19 nt, artificial
  Oligomer
cggauuguucgaggccaaa

SEQ ID NO: 12108 - RNA, 19 nt, artificial
  Oligomer
cacaccauguuuucaucgu

SEQ ID NO: 12109 - RNA, 19 nt, artificial
  Oligomer
gaccucgucaacugaguuc

SEQ ID NO: 12110 - RNA, 19 nt, artificial
  Oligomer
uugaucaugaccucgucaa

SEQ ID NO: 12111 - RNA, 19 nt, artificial
  Oligomer
gucuugaucaugaccucgu

SEQ ID NO: 12112 - RNA, 19 nt, artificial
  Oligomer
cuaacgagagcuaccucaa

SEQ ID NO: 12113 - RNA, 19 nt, artificial
  Oligomer
acaaaaaccucagauuuca

SEQ ID NO: 12114 - RNA, 19 nt, artificial
  Oligomer
cuaauaccugucagucgaa

SEQ ID NO: 12115 - RNA, 19 nt, artificial
  Oligomer
ggaagcccuuacuaacgac

SEQ ID NO: 12116 - RNA, 19 nt, artificial
  Oligomer
cuaaagcucucucgaggac

SEQ ID NO: 12117 - RNA, 19 nt, artificial
  Oligomer
cagaagaccuucuauggga

SEQ ID NO: 12118 - RNA, 19 nt, artificial
  Oligomer
ggucucuccaccauauuag

SEQ ID NO: 12119 - RNA, 19 nt, artificial
  Oligomer
cucacuuucugaguuauca

SEQ ID NO: 12120 - RNA, 19 nt, artificial
  Oligomer
aaacucacuuucugaguua

SEQ ID NO: 12121 - RNA, 19 nt, artificial
  Oligomer
ggaaaacucacuuucugag

SEQ ID NO: 12122 - RNA, 19 nt, artificial
  Oligomer
acagauguauuucacuacc

SEQ ID NO: 12123 - RNA, 19 nt, artificial
  Oligomer
ugcccugacagauguauuu

SEQ ID NO: 12124 - RNA, 19 nt, artificial
  Oligomer
acaugaaaaagcguggcuu

SEQ ID NO: 12125 - RNA, 19 nt, artificial
  Oligomer
agccgaagagcaacaagua

SEQ ID NO: 12126 - RNA, 19 nt, artificial
  Oligomer
ccucaauuuucuggcaagg

SEQ ID NO: 12127 - RNA, 19 nt, artificial
  Oligomer
ugguacacacaccauguuu

SEQ ID NO: 12128 - RNA, 19 nt, artificial
  Oligomer
gggagaagaaauuuccuga

SEQ ID NO: 12129 - RNA, 19 nt, artificial
  Oligomer
ucaacugaguucaucagac

SEQ ID NO: 12130 - RNA, 19 nt, artificial
  Oligomer
ucagauuucacaaacuggu

SEQ ID NO: 12131 - RNA, 19 nt, artificial
  Oligomer
acaugucauauacaacaga

SEQ ID NO: 12132 - RNA, 19 nt, artificial
  Oligomer
auaccauacuuccuuagcu

SEQ ID NO: 12133 - RNA, 19 nt, artificial
  Oligomer
ugugaacaguacacuauac

SEQ ID NO: 12134 - RNA, 19 nt, artificial
  Oligomer
guacucucauggcugggaa

SEQ ID NO: 12135 - RNA, 19 nt, artificial
  Oligomer
agaagaccuucuaugggag

SEQ ID NO: 12136 - RNA, 19 nt, artificial
  Oligomer
ugagggucucuccaccaua

SEQ ID NO: 12137 - RNA, 19 nt, artificial
  Oligomer
ugagugguuugcugaucuc

SEQ ID NO: 12138 - RNA, 19 nt, artificial
  Oligomer
gaacuucacaugaaaaagc

SEQ ID NO: 12139 - RNA, 19 nt, artificial
  Oligomer
gaguccuggaacuucacau

SEQ ID NO: 12140 - RNA, 19 nt, artificial
  Oligomer
ucauuaccaaggugguaag

SEQ ID NO: 12141 - RNA, 19 nt, artificial
  Oligomer
gucauuaccaaggugguaa

SEQ ID NO: 12142 - RNA, 19 nt, artificial
  Oligomer
gagaccgcuaugcagaaug

SEQ ID NO: 12143 - RNA, 19 nt, artificial
  Oligomer
cccaagacagucucucucu

SEQ ID NO: 12144 - RNA, 19 nt, artificial
  Oligomer
ggauuguucgaggccaaac

SEQ ID NO: 12145 - RNA, 19 nt, artificial
  Oligomer
ggagaagaaauuuccugac

SEQ ID NO: 12146 - RNA, 19 nt, artificial
  Oligomer
ccuccuaugaguuguucug

SEQ ID NO: 12147 - RNA, 19 nt, artificial
  Oligomer
ccucgucaacugaguucau

SEQ ID NO: 12148 - RNA, 19 nt, artificial
  Oligomer
ggauagcuguuaaugcaac

SEQ ID NO: 12149 - RNA, 19 nt, artificial
  Oligomer
cugucagucgaaaccuuau

SEQ ID NO: 12150 - RNA, 19 nt, artificial
  Oligomer
gaauuuuaacugcaugcua

SEQ ID NO: 12151 - RNA, 19 nt, artificial
  Oligomer
cgcacugugccugaauuuu

SEQ ID NO: 12152 - RNA, 19 nt, artificial
  Oligomer
agcccuuacuaacgaccca

SEQ ID NO: 12153 - RNA, 19 nt, artificial
  Oligomer
accauacuuccuuagcuua

SEQ ID NO: 12154 - RNA, 19 nt, artificial
  Oligomer
caguugggaacuggugaau

SEQ ID NO: 12155 - RNA, 19 nt, artificial
  Oligomer
cucucauggcugggaauaa

SEQ ID NO: 12156 - RNA, 19 nt, artificial
  Oligomer
agacuuuggaggucaaguc

SEQ ID NO: 12157 - RNA, 19 nt, artificial
  Oligomer
cacuucaaaagaugugcca

SEQ ID NO: 12158 - RNA, 19 nt, artificial
  Oligomer
cucuccaccauauuaguac

SEQ ID NO: 12159 - RNA, 19 nt, artificial
  Oligomer
agccauaucuucgcuggag

SEQ ID NO: 12160 - RNA, 19 nt, artificial
  Oligomer
caguacaucuuggugcagu

SEQ ID NO: 12161 - RNA, 19 nt, artificial
  Oligomer
cacaugaaaaagcguggcu

SEQ ID NO: 12162 - RNA, 19 nt, artificial
  Oligomer
cuggaguccuggaacuuca

SEQ ID NO: 12163 - RNA, 19 nt, artificial
  Oligomer
cuaugcagaauggcagaca

SEQ ID NO: 12164 - RNA, 19 nt, artificial
  Oligomer
cgcuaugcagaauggcaga

SEQ ID NO: 12165 - RNA, 19 nt, artificial
  Oligomer
ucuucaaccuggaacgcua

SEQ ID NO: 12166 - RNA, 19 nt, artificial
  Oligomer
agcuguuaaugcaaccauc

SEQ ID NO: 12167 - RNA, 19 nt, artificial
  Oligomer
ucacaaacuggucgccuau

SEQ ID NO: 12168 - RNA, 19 nt, artificial
  Oligomer
gacaaaaaccucagauuuc

SEQ ID NO: 12169 - RNA, 19 nt, artificial
  Oligomer
cuauugugaacaguacacu

SEQ ID NO: 12170 - RNA, 19 nt, artificial
  Oligomer
guggaccuaaagcucucuc

SEQ ID NO: 12171 - RNA, 19 nt, artificial
  Oligomer
aacucacuuucugaguuau

SEQ ID NO: 12172 - RNA, 19 nt, artificial
  Oligomer
aaaacucacuuucugaguu

SEQ ID NO: 12173 - RNA, 19 nt, artificial
  Oligomer
ucccuggaaacacggauga

SEQ ID NO: 12174 - RNA, 19 nt, artificial
  Oligomer
agcaagguguauuucuacu

SEQ ID NO: 12175 - RNA, 19 nt, artificial
  Oligomer
gacuuuuucagcgugcaca

SEQ ID NO: 12176 - RNA, 19 nt, artificial
  Oligomer
ccauaucuucgcuggagug

SEQ ID NO: 12177 - RNA, 19 nt, artificial
  Oligomer
ggcaguacaucuuggugca

SEQ ID NO: 12178 - RNA, 19 nt, artificial
  Oligomer
uggcuuuaaaauggcgcca

SEQ ID NO: 12179 - RNA, 19 nt, artificial
  Oligomer
cucgucaacugaguucauc

SEQ ID NO: 12180 - RNA, 19 nt, artificial
  Oligomer
ggcgcauuucuucaaccug

SEQ ID NO: 12181 - RNA, 19 nt, artificial
  Oligomer
uggcgcauuucuucaaccu

SEQ ID NO: 12182 - RNA, 19 nt, artificial
  Oligomer
uagcuguuaaugcaaccau

SEQ ID NO: 12183 - RNA, 19 nt, artificial
  Oligomer
cgccuaugggauagcuguu

SEQ ID NO: 12184 - RNA, 19 nt, artificial
  Oligomer
uucacaaacuggucgccua

SEQ ID NO: 12185 - RNA, 19 nt, artificial
  Oligomer
accguggaggaggcaauua

SEQ ID NO: 12186 - RNA, 19 nt, artificial
  Oligomer
acaaguauuugcugcagag

SEQ ID NO: 12187 - RNA, 19 nt, artificial
  Oligomer
gaacaaguauuugcugcag

SEQ ID NO: 12188 - RNA, 19 nt, artificial
  Oligomer
aacaagaaguugucauuac

SEQ ID NO: 12189 - RNA, 19 nt, artificial
  Oligomer
cgauuucaacaagaaguug

SEQ ID NO: 12190 - RNA, 19 nt, artificial
  Oligomer
ggaaauggauuuuaggccc

SEQ ID NO: 12191 - RNA, 19 nt, artificial
  Oligomer
ucaucagacaggccuccua

SEQ ID NO: 12192 - RNA, 19 nt, artificial
  Oligomer
cgucaacugaguucaucag

SEQ ID NO: 12193 - RNA, 19 nt, artificial
  Oligomer
agagcuaccucaacccugu

SEQ ID NO: 12194 - RNA, 19 nt, artificial
  Oligomer
ucagucgaaaccuuauuuc

SEQ ID NO: 12195 - RNA, 19 nt, artificial
  Oligomer
ugucagucgaaaccuuauu

SEQ ID NO: 12196 - RNA, 19 nt, artificial
  Oligomer
cggccuguugauaugagcu

SEQ ID NO: 12197 - RNA, 19 nt, artificial
  Oligomer
cauuguguuuucaaucaag

SEQ ID NO: 12198 - RNA, 19 nt, artificial
  Oligomer
ggaccuaaagcucucucga

SEQ ID NO: 12199 - RNA, 19 nt, artificial
  Oligomer
gcuuaaagcagaagaccuu

SEQ ID NO: 12200 - RNA, 19 nt, artificial
  Oligomer
gaaauggauuuuaggcccu

SEQ ID NO: 12201 - RNA, 19 nt, artificial
  Oligomer
acagucucucucugcacaa

SEQ ID NO: 12202 - RNA, 19 nt, artificial
  Oligomer
ccuaacgagagcuaccuca

SEQ ID NO: 12203 - RNA, 19 nt, artificial
  Oligomer
cgaaaccuuauuucauuca

SEQ ID NO: 12204 - RNA, 19 nt, artificial
  Oligomer
cugcccugacagauguauu

SEQ ID NO: 12205 - RNA, 19 nt, artificial
  Oligomer
gcaguacaucuuggugcag

SEQ ID NO: 12206 - RNA, 19 nt, artificial
  Oligomer
acaaccacugaauugcuaa

SEQ ID NO: 12207 - RNA, 19 nt, artificial
  Oligomer
caaucaaguuauugauucc

SEQ ID NO: 12208 - RNA, 19 nt, artificial
  Oligomer
gacagucucucucugcaca

SEQ ID NO: 12209 - RNA, 19 nt, artificial
  Oligomer
ucaacaagaaguugucauu

SEQ ID NO: 12210 - RNA, 19 nt, artificial
  Oligomer
aggcccuguggucuuguau

SEQ ID NO: 12211 - RNA, 19 nt, artificial
  Oligomer
uaggcccuguggucuugua

SEQ ID NO: 12212 - RNA, 19 nt, artificial
  Oligomer
agaagaaauuuccugacag

SEQ ID NO: 12213 - RNA, 19 nt, artificial
  Oligomer
gccuaugggauagcuguua

SEQ ID NO: 12214 - RNA, 19 nt, artificial
  Oligomer
uucaacaagaaguugucau

SEQ ID NO: 12215 - RNA, 19 nt, artificial
  Oligomer
caacaagaaguugucauua

SEQ ID NO: 12216 - RNA, 19 nt, artificial
  Oligomer
ucgaaaccuuauuucauuc

SEQ ID NO: 12217 - RNA, 19 nt, artificial
  Oligomer
ccaacauccagacacaggu

SEQ ID NO: 12218 - RNA, 19 nt, artificial
  Oligomer
agaggaacaaguauuugcu

SEQ ID NO: 12219 - RNA, 19 nt, artificial
  Oligomer
ucuggcgauuucaacaaga

SEQ ID NO: 12220 - RNA, 19 nt, artificial
  Oligomer
aagagccugauuuucaucc

SEQ ID NO: 12221 - RNA, 19 nt, artificial
  Oligomer
uaaaaauuuauucccagcc

SEQ ID NO: 12222 - RNA, 19 nt, artificial
  Oligomer
aucuuuugaaguguccucg

SEQ ID NO: 12223 - RNA, 19 nt, artificial
  Oligomer
aacucauuguuccaguugg

SEQ ID NO: 12224 - RNA, 19 nt, artificial
  Oligomer
uuccuugccagaaaauuga

SEQ ID NO: 12225 - RNA, 19 nt, artificial
  Oligomer
aaaaauuuauucccagcca

SEQ ID NO: 12226 - RNA, 19 nt, artificial
  Oligomer
agagccugauuuucauccc

SEQ ID NO: 12227 - RNA, 19 nt, artificial
  Oligomer
augaucaagacuaaagcca

SEQ ID NO: 12228 - RNA, 19 nt, artificial
  Oligomer
uuuuugucuaauugccucc

SEQ ID NO: 12229 - RNA, 19 nt, artificial
  Oligomer
uugaacccaaaauaacucg

SEQ ID NO: 12230 - RNA, 19 nt, artificial
  Oligomer
augcaguuaaaauucaggc

SEQ ID NO: 12231 - RNA, 19 nt, artificial
  Oligomer
aaggaaguaugguauagug

SEQ ID NO: 12232 - RNA, 19 nt, artificial
  Oligomer
uaugauaacucagaaagug

SEQ ID NO: 12233 - RNA, 19 nt, artificial
  Oligomer
ccaucaugauacuuguugc

SEQ ID NO: 12234 - RNA, 19 nt, artificial
  Oligomer
uucaugugaaguuccagga

SEQ ID NO: 12235 - RNA, 19 nt, artificial
  Oligomer
aggcugagaaagaagacga

SEQ ID NO: 12236 - RNA, 19 nt, artificial
  Oligomer
aagaagacgaugaaaacau

SEQ ID NO: 12237 - RNA, 19 nt, artificial
  Oligomer
aucaagacuaaagccagag

SEQ ID NO: 12238 - RNA, 19 nt, artificial
  Oligomer
guccuuagcaauucagugg

SEQ ID NO: 12239 - RNA, 19 nt, artificial
  Oligomer
uagaagcucuccuuguugu

SEQ ID NO: 12240 - RNA, 19 nt, artificial
  Oligomer
guaauagaaaugaacaccu

SEQ ID NO: 12241 - RNA, 19 nt, artificial
  Oligomer
agauuucagaagagcagcg

SEQ ID NO: 12242 - RNA, 19 nt, artificial
  Oligomer
uugggucguuaguaagggc

SEQ ID NO: 12243 - RNA, 19 nt, artificial
  Oligomer
auaagcuaaggaaguaugg

SEQ ID NO: 12244 - RNA, 19 nt, artificial
  Oligomer
cugauuuucaucccagccg

SEQ ID NO: 12245 - RNA, 19 nt, artificial
  Oligomer
aaccacucaaaagcucuug

SEQ ID NO: 12246 - RNA, 19 nt, artificial
  Oligomer
auagauuucagaagagcag

SEQ ID NO: 12247 - RNA, 19 nt, artificial
  Oligomer
ugaaauacaucugucaggg

SEQ ID NO: 12248 - RNA, 19 nt, artificial
  Oligomer
cccaucaugauacuuguug

SEQ ID NO: 12249 - RNA, 19 nt, artificial
  Oligomer
caucaugauacuuguugcu

SEQ ID NO: 12250 - RNA, 19 nt, artificial
  Oligomer
auacuuguugcucuucggc

SEQ ID NO: 12251 - RNA, 19 nt, artificial
  Oligomer
cugagaaagaagacgauga

SEQ ID NO: 12252 - RNA, 19 nt, artificial
  Oligomer
caugaucaagacuaaagcc

SEQ ID NO: 12253 - RNA, 19 nt, artificial
  Oligomer
uaaaauucaggcacagugc

SEQ ID NO: 12254 - RNA, 19 nt, artificial
  Oligomer
cuaaggaaguaugguauag

SEQ ID NO: 12255 - RNA, 19 nt, artificial
  Oligomer
aagaacacgccaauacugc

SEQ ID NO: 12256 - RNA, 19 nt, artificial
  Oligomer
aaucugcuugaacucauug

SEQ ID NO: 12257 - RNA, 19 nt, artificial
  Oligomer
uuaagccuguaaucacguc

SEQ ID NO: 12258 - RNA, 19 nt, artificial
  Oligomer
uguaaagcuaugugaagag

SEQ ID NO: 12259 - RNA, 19 nt, artificial
  Oligomer
gagccugauuuucauccca

SEQ ID NO: 12260 - RNA, 19 nt, artificial
  Oligomer
ugauuuucaucccagccgg

SEQ ID NO: 12261 - RNA, 19 nt, artificial
  Oligomer
augauaacucagaaaguga

SEQ ID NO: 12262 - RNA, 19 nt, artificial
  Oligomer
cugcauuuguaccauauag

SEQ ID NO: 12263 - RNA, 19 nt, artificial
  Oligomer
uucagaagagcagcgaagg

SEQ ID NO: 12264 - RNA, 19 nt, artificial
  Oligomer
cugaaaaagucuuccuggg

SEQ ID NO: 12265 - RNA, 19 nt, artificial
  Oligomer
ucaugauacuuguugcucu

SEQ ID NO: 12266 - RNA, 19 nt, artificial
  Oligomer
gauacuuguugcucuucgg

SEQ ID NO: 12267 - RNA, 19 nt, artificial
  Oligomer
aaaauccauuuccaagccg

SEQ ID NO: 12268 - RNA, 19 nt, artificial
  Oligomer
auucagugguuguguuugu

SEQ ID NO: 12269 - RNA, 19 nt, artificial
  Oligomer
uuccagguugaagaaaugc

SEQ ID NO: 12270 - RNA, 19 nt, artificial
  Oligomer
aguuugugaaaucugaggu

SEQ ID NO: 12271 - RNA, 19 nt, artificial
  Oligomer
aaaucugagguuuuugucu

SEQ ID NO: 12272 - RNA, 19 nt, artificial
  Oligomer
auacuuguuccucuuauga

SEQ ID NO: 12273 - RNA, 19 nt, artificial
  Oligomer
uauuagaauuagcaugcag

SEQ ID NO: 12274 - RNA, 19 nt, artificial
  Oligomer
guugggucguuaguaaggg

SEQ ID NO: 12275 - RNA, 19 nt, artificial
  Oligomer
aacccaaaauaacucgugu

SEQ ID NO: 12276 - RNA, 19 nt, artificial
  Oligomer
aaaauuuauucccagccau

SEQ ID NO: 12277 - RNA, 19 nt, artificial
  Oligomer
uugaaaacacaaugccugg

SEQ ID NO: 12278 - RNA, 19 nt, artificial
  Oligomer
aauagaaaugaacaccucu

SEQ ID NO: 12279 - RNA, 19 nt, artificial
  Oligomer
caucuuuugaaguguccuc

SEQ ID NO: 12280 - RNA, 19 nt, artificial
  Oligomer
cuuuaagccuguaaucacg

SEQ ID NO: 12281 - RNA, 19 nt, artificial
  Oligomer
agccugauuuucaucccag

SEQ ID NO: 12282 - RNA, 19 nt, artificial
  Oligomer
accacucaaaagcucuugc

SEQ ID NO: 12283 - RNA, 19 nt, artificial
  Oligomer
agacccucauucaaaaucc

SEQ ID NO: 12284 - RNA, 19 nt, artificial
  Oligomer
aaauacaccuugcucagcu

SEQ ID NO: 12285 - RNA, 19 nt, artificial
  Oligomer
uagauuucagaagagcagc

SEQ ID NO: 12286 - RNA, 19 nt, artificial
  Oligomer
gugaaauacaucugucagg

SEQ ID NO: 12287 - RNA, 19 nt, artificial
  Oligomer
augauacuuguugcucuuc

SEQ ID NO: 12288 - RNA, 19 nt, artificial
  Oligomer
uucuuguugaaaucgccag

SEQ ID NO: 12289 - RNA, 19 nt, artificial
  Oligomer
uuggccucgaacaauccga

SEQ ID NO: 12290 - RNA, 19 nt, artificial
  Oligomer
uccagguugaagaaaugcg

SEQ ID NO: 12291 - RNA, 19 nt, artificial
  Oligomer
uuuugucuaauugccuccu

SEQ ID NO: 12292 - RNA, 19 nt, artificial
  Oligomer
gguauuagaauuagcaugc

SEQ ID NO: 12293 - RNA, 19 nt, artificial
  Oligomer
uuaaaauucaggcacagug

SEQ ID NO: 12294 - RNA, 19 nt, artificial
  Oligomer
cuucauaccaguagaacgu

SEQ ID NO: 12295 - RNA, 19 nt, artificial
  Oligomer
uucauaccaguagaacgug

SEQ ID NO: 12296 - RNA, 19 nt, artificial
  Oligomer
uuguucuguuguauaugac

SEQ ID NO: 12297 - RNA, 19 nt, artificial
  Oligomer
aauuuauucccagccauga

SEQ ID NO: 12298 - RNA, 19 nt, artificial
  Oligomer
auugaaaacacaaugccug

SEQ ID NO: 12299 - RNA, 19 nt, artificial
  Oligomer
uccaaagucuagaagcucu

SEQ ID NO: 12300 - RNA, 19 nt, artificial
  Oligomer
uuuaagccuguaaucacgu

SEQ ID NO: 12301 - RNA, 19 nt, artificial
  Oligomer
cacgucaguauuuucgucc

SEQ ID NO: 12302 - RNA, 19 nt, artificial
  Oligomer
uguaccauauagauuucag

SEQ ID NO: 12303 - RNA, 19 nt, artificial
  Oligomer
aucgccagaaccuaauuau

SEQ ID NO: 12304 - RNA, 19 nt, artificial
  Oligomer
uucuuucacaugcauacaa

SEQ ID NO: 12305 - RNA, 19 nt, artificial
  Oligomer
cagaaaauugaggcacggg

SEQ ID NO: 12306 - RNA, 19 nt, artificial
  Oligomer
cagaaggugauguugugca

SEQ ID NO: 12307 - RNA, 19 nt, artificial
  Oligomer
agaaggugauguugugcag

SEQ ID NO: 12308 - RNA, 19 nt, artificial
  Oligomer
aaggugauguugugcagag

SEQ ID NO: 12309 - RNA, 19 nt, artificial
  Oligomer
ucggcugucaggaaauuuc

SEQ ID NO: 12310 - RNA, 19 nt, artificial
  Oligomer
auguugugcagagagagac

SEQ ID NO: 12311 - RNA, 19 nt, artificial
  Oligomer
gaugaaaacauggugugug

SEQ ID NO: 12312 - RNA, 19 nt, artificial
  Oligomer
uccuuagcaauucaguggu

SEQ ID NO: 12313 - RNA, 19 nt, artificial
  Oligomer
uugaagaaaugcgccacga

SEQ ID NO: 12314 - RNA, 19 nt, artificial
  Oligomer
guuuuugucuaauugccuc

SEQ ID NO: 12315 - RNA, 19 nt, artificial
  Oligomer
gaacccaaaauaacucgug

SEQ ID NO: 12316 - RNA, 19 nt, artificial
  Oligomer
cuccucuucauaccaguag

SEQ ID NO: 12317 - RNA, 19 nt, artificial
  Oligomer
ucauaccaguagaacgugu

SEQ ID NO: 12318 - RNA, 19 nt, artificial
  Oligomer
auuuauucccagccaugag

SEQ ID NO: 12319 - RNA, 19 nt, artificial
  Oligomer
agcugaugaauacaagugg

SEQ ID NO: 12320 - RNA, 19 nt, artificial
  Oligomer
augagaguacuaauauggu

SEQ ID NO: 12321 - RNA, 19 nt, artificial
  Oligomer
aagccuguaaucacgucag

SEQ ID NO: 12322 - RNA, 19 nt, artificial
  Oligomer
caaaagcucuugcaucccg

SEQ ID NO: 12323 - RNA, 19 nt, artificial
  Oligomer
cauauagauuucagaagag

SEQ ID NO: 12324 - RNA, 19 nt, artificial
  Oligomer
ucuuucacaugcauacaag

SEQ ID NO: 12325 - RNA, 19 nt, artificial
  Oligomer
uuucacaugcauacaagac

SEQ ID NO: 12326 - RNA, 19 nt, artificial
  Oligomer
gcugucaggaaauuucuuc

SEQ ID NO: 12327 - RNA, 19 nt, artificial
  Oligomer
accagaacaacucauagga

SEQ ID NO: 12328 - RNA, 19 nt, artificial
  Oligomer
caagacuaaagccagagag

SEQ ID NO: 12329 - RNA, 19 nt, artificial
  Oligomer
acuaaagccagagagauca

SEQ ID NO: 12330 - RNA, 19 nt, artificial
  Oligomer
uucagugguuguguuugug

SEQ ID NO: 12331 - RNA, 19 nt, artificial
  Oligomer
cagugguuguguuuguggg

SEQ ID NO: 12332 - RNA, 19 nt, artificial
  Oligomer
aaucugagguuuuugucua

SEQ ID NO: 12333 - RNA, 19 nt, artificial
  Oligomer
aucugagguuuuugucuaa

SEQ ID NO: 12334 - RNA, 19 nt, artificial
  Oligomer
aaauaagguuucgacugac

SEQ ID NO: 12335 - RNA, 19 nt, artificial
  Oligomer
ugacagguauuagaauuag

SEQ ID NO: 12336 - RNA, 19 nt, artificial
  Oligomer
guauuagaauuagcaugca

SEQ ID NO: 12337 - RNA, 19 nt, artificial
  Oligomer
caugcaguuaaaauucagg

SEQ ID NO: 12338 - RNA, 19 nt, artificial
  Oligomer
ugaacccaaaauaacucgu

SEQ ID NO: 12339 - RNA, 19 nt, artificial
  Oligomer
auaccaguagaacguguca

SEQ ID NO: 12340 - RNA, 19 nt, artificial
  Oligomer
agaaaugaacaccucuggg

SEQ ID NO: 12341 - RNA, 19 nt, artificial
  Oligomer
ugagaguacuaauauggug

SEQ ID NO: 12342 - RNA, 19 nt, artificial
  Oligomer
acgucaguauuuucguccc

SEQ ID NO: 12343 - RNA, 19 nt, artificial
  Oligomer
aguaagagaucagcaaacc

SEQ ID NO: 12344 - RNA, 19 nt, artificial
  Oligomer
uauagauuucagaagagca

SEQ ID NO: 12345 - RNA, 19 nt, artificial
  Oligomer
cauucaaaauccagcaccc

SEQ ID NO: 12346 - RNA, 19 nt, artificial
  Oligomer
cgccauuuuaaagccacgc

SEQ ID NO: 12347 - RNA, 19 nt, artificial
  Oligomer
augcauacaagaccacagg

SEQ ID NO: 12348 - RNA, 19 nt, artificial
  Oligomer
ucucuacagaaggugaugu

SEQ ID NO: 12349 - RNA, 19 nt, artificial
  Oligomer
aagccagagagaucaccag

SEQ ID NO: 12350 - RNA, 19 nt, artificial
  Oligomer
ccagguugaagaaaugcgc

SEQ ID NO: 12351 - RNA, 19 nt, artificial
  Oligomer
guugaagaaaugcgccacg

SEQ ID NO: 12352 - RNA, 19 nt, artificial
  Oligomer
gagguuuuugucuaauugc

SEQ ID NO: 12353 - RNA, 19 nt, artificial
  Oligomer
auuagaauuagcaugcagu

SEQ ID NO: 12354 - RNA, 19 nt, artificial
  Oligomer
ugcaguuaaaauucaggca

SEQ ID NO: 12355 - RNA, 19 nt, artificial
  Oligomer
cauaccaguagaacguguc

SEQ ID NO: 12356 - RNA, 19 nt, artificial
  Oligomer
gaaaacacaaugccuggac

SEQ ID NO: 12357 - RNA, 19 nt, artificial
  Oligomer
acucauccguguuuccagg

SEQ ID NO: 12358 - RNA, 19 nt, artificial
  Oligomer
gaaauacaucugucagggc

SEQ ID NO: 12359 - RNA, 19 nt, artificial
  Oligomer
uuguugaaaucgccagaac

SEQ ID NO: 12360 - RNA, 19 nt, artificial
  Oligomer
ucacaugcauacaagacca

SEQ ID NO: 12361 - RNA, 19 nt, artificial
  Oligomer
aaauccauuuccaagccga

SEQ ID NO: 12362 - RNA, 19 nt, artificial
  Oligomer
auuucuucucccucaccug

SEQ ID NO: 12363 - RNA, 19 nt, artificial
  Oligomer
uuucuucucccucaccugu

SEQ ID NO: 12364 - RNA, 19 nt, artificial
  Oligomer
aagaaaugcgccacgaugu

SEQ ID NO: 12365 - RNA, 19 nt, artificial
  Oligomer
ugagguuuuugucuaauug

SEQ ID NO: 12366 - RNA, 19 nt, artificial
  Oligomer
gacagguauuagaauuagc

SEQ ID NO: 12367 - RNA, 19 nt, artificial
  Oligomer
acagguauuagaauuagca

SEQ ID NO: 12368 - RNA, 19 nt, artificial
  Oligomer
agcaugcaguuaaaauuca

SEQ ID NO: 12369 - RNA, 19 nt, artificial
  Oligomer
guugaacccaaaauaacuc

SEQ ID NO: 12370 - RNA, 19 nt, artificial
  Oligomer
acccaaaauaacucgugug

SEQ ID NO: 12371 - RNA, 19 nt, artificial
  Oligomer
uagguccacagaagaacac

SEQ ID NO: 12372 - RNA, 19 nt, artificial
  Oligomer
cagaagaacacgccaauac

SEQ ID NO: 12373 - RNA, 19 nt, artificial
  Oligomer
aucacgucaguauuuucgu

SEQ ID NO: 12374 - RNA, 19 nt, artificial
  Oligomer
agggagaguaagagaucag

SEQ ID NO: 12375 - RNA, 19 nt, artificial
  Oligomer
cagcaaaccacucaaaagc

SEQ ID NO: 12376 - RNA, 19 nt, artificial
  Oligomer
aaaccacucaaaagcucuu

SEQ ID NO: 12377 - RNA, 19 nt, artificial
  Oligomer
ucaaaagcucuugcauccc

SEQ ID NO: 12378 - RNA, 19 nt, artificial
  Oligomer
aucccggcaaauccaguag

SEQ ID NO: 12379 - RNA, 19 nt, artificial
  Oligomer
aaagccagagagaucacca

SEQ ID NO: 12380 - RNA, 19 nt, artificial
  Oligomer
cuuagcaauucagugguug

SEQ ID NO: 12381 - RNA, 19 nt, artificial
  Oligomer
uucuucucccucaccugug

SEQ ID NO: 12382 - RNA, 19 nt, artificial
  Oligomer
ucuucucccucaccugugu

SEQ ID NO: 12383 - RNA, 19 nt, artificial
  Oligomer
agguauuagaauuagcaug

SEQ ID NO: 12384 - RNA, 19 nt, artificial
  Oligomer
aaagacuccuccucuucau

SEQ ID NO: 12385 - RNA, 19 nt, artificial
  Oligomer
cuccuccucuucauaccag

SEQ ID NO: 12386 - RNA, 19 nt, artificial
  Oligomer
uaccaguagaacgugucaa

SEQ ID NO: 12387 - RNA, 19 nt, artificial
  Oligomer
uagaacgugucaauaaaca

SEQ ID NO: 12388 - RNA, 19 nt, artificial
  Oligomer
cucauaucaacaggccguc

SEQ ID NO: 12389 - RNA, 19 nt, artificial
  Oligomer
ugaaaacacaaugccugga

SEQ ID NO: 12390 - RNA, 19 nt, artificial
  Oligomer
aaguggcacaucuuuugaa

SEQ ID NO: 12391 - RNA, 19 nt, artificial
  Oligomer
uucgucccaguguaaagcu

SEQ ID NO: 12392 - RNA, 19 nt, artificial
  Oligomer
ccuggcgccauuuuaaagc

SEQ ID NO: 12393 - RNA, 19 nt, artificial
  Oligomer
ugguaaugacaacuucuug

SEQ ID NO: 12394 - RNA, 19 nt, artificial
  Oligomer
gguaaugacaacuucuugu

SEQ ID NO: 12395 - RNA, 19 nt, artificial
  Oligomer
cacaugcauacaagaccac

SEQ ID NO: 12396 - RNA, 19 nt, artificial
  Oligomer
caggcugagaaagaagacg

SEQ ID NO: 12397 - RNA, 19 nt, artificial
  Oligomer
gacuccuccucuucauacc

SEQ ID NO: 12398 - RNA, 19 nt, artificial
  Oligomer
ugggagcucauaucaacag

SEQ ID NO: 12399 - RNA, 19 nt, artificial
  Oligomer
ggagcucauaucaacaggc

SEQ ID NO: 12400 - RNA, 19 nt, artificial
  Oligomer
aaaacacaaugccuggacu

SEQ ID NO: 12401 - RNA, 19 nt, artificial
  Oligomer
ucacgucaguauuuucguc

SEQ ID NO: 12402 - RNA, 19 nt, artificial
  Oligomer
cagggagaguaagagauca

SEQ ID NO: 12403 - RNA, 19 nt, artificial
  Oligomer
auacaccuugcucagcuuc

SEQ ID NO: 12404 - RNA, 19 nt, artificial
  Oligomer
cucauucaaaauccagcac

SEQ ID NO: 12405 - RNA, 19 nt, artificial
  Oligomer
auccauuuccaagccgagg

SEQ ID NO: 12406 - RNA, 19 nt, artificial
  Oligomer
auagcggucucuacagaag

SEQ ID NO: 12407 - RNA, 19 nt, artificial
  Oligomer
uagcggucucuacagaagg

SEQ ID NO: 12408 - RNA, 19 nt, artificial
  Oligomer
guugugcagagagagacug

SEQ ID NO: 12409 - RNA, 19 nt, artificial
  Oligomer
aguuaaaauucaggcacag

SEQ ID NO: 12410 - RNA, 19 nt, artificial
  Oligomer
aacgugucaauaaacagau

SEQ ID NO: 12411 - RNA, 19 nt, artificial
  Oligomer
aacacaaugccuggacuug

SEQ ID NO: 12412 - RNA, 19 nt, artificial
  Oligomer
cacaaugccuggacuugac

SEQ ID NO: 12413 - RNA, 19 nt, artificial
  Oligomer
cagcugaugaauacaagug

SEQ ID NO: 12414 - RNA, 19 nt, artificial
  Oligomer
gcugaugaauacaaguggc

SEQ ID NO: 12415 - RNA, 19 nt, artificial
  Oligomer
cugaugaauacaaguggca

SEQ ID NO: 12416 - RNA, 19 nt, artificial
  Oligomer
caaguggcacaucuuuuga

SEQ ID NO: 12417 - RNA, 19 nt, artificial
  Oligomer
uacaccuugcucagcuuca

SEQ ID NO: 12418 - RNA, 19 nt, artificial
  Oligomer
caugcauacaagaccacag

SEQ ID NO: 12419 - RNA, 19 nt, artificial
  Oligomer
uaaaauccauuuccaagcc

SEQ ID NO: 12420 - RNA, 19 nt, artificial
  Oligomer
cuuuggaaucaauaacuug

SEQ ID NO: 12421 - RNA, 19 nt, artificial
  Oligomer
uugauugaaaacacaaugc

SEQ ID NO: 12422 - RNA, 19 nt, artificial
  Oligomer
augaauacaaguggcacau

SEQ ID NO: 12423 - RNA, 19 nt, artificial
  Oligomer
aaagcuaugugaagagccu

SEQ ID NO: 12424 - RNA, 19 nt, artificial
  Oligomer
accuugcucagcuucagug

SEQ ID NO: 12425 - RNA, 19 nt, artificial
  Oligomer
accaagauguacugcccug

SEQ ID NO: 12426 - RNA, 19 nt, artificial
  Oligomer
accacagggccuaaaaucc

SEQ ID NO: 12427 - RNA, 19 nt, artificial
  Oligomer
aaaagcucuugcaucccgg

SEQ ID NO: 12428 - RNA, 19 nt, artificial
  Oligomer
uuuaaagccacgcuuuuuc

SEQ ID NO: 12429 - RNA, 19 nt, artificial
  Oligomer
uuuuucaugugaaguucca

SEQ ID NO: 12430 - RNA, 19 nt, artificial
  Oligomer
ugcauacaagaccacaggg

SEQ ID NO: 12431 - RNA, 19 nt, artificial
  Oligomer
uaacucguguguaauggaa

SEQ ID NO: 12432 - RNA, 19 nt, artificial
  Oligomer
gaacgugucaauaaacaga

SEQ ID NO: 12433 - RNA, 19 nt, artificial
  Oligomer
gaauacaaguggcacaucu

SEQ ID NO: 12434 - RNA, 19 nt, artificial
  Oligomer
ucauuguuccaguugggcc

SEQ ID NO: 12435 - RNA, 19 nt, artificial
  Oligomer
ucuucugcuuuaagccugu

SEQ ID NO: 12436 - RNA, 19 nt, artificial
  Oligomer
aacuucuuguugaaaucgc

SEQ ID NO: 12437 - RNA, 19 nt, artificial
  Oligomer
aaaacaugguguguguacc

SEQ ID NO: 12438 - RNA, 19 nt, artificial
  Oligomer
uugaacucauuguuccagu

SEQ ID NO: 12439 - RNA, 19 nt, artificial
  Oligomer
gucuucugcuuuaagccug

SEQ ID NO: 12440 - RNA, 19 nt, artificial
  Oligomer
aagcuaugugaagagccug

SEQ ID NO: 12441 - RNA, 19 nt, artificial
  Oligomer
cucaaaagcucuugcaucc

SEQ ID NO: 12442 - RNA, 19 nt, artificial
  Oligomer
uuguugcucuucggcuguc

SEQ ID NO: 12443 - RNA, 19 nt, artificial
  Oligomer
auuaacagcuaucccauag

SEQ ID NO: 12444 - RNA, 19 nt, artificial
  Oligomer
uuaacagcuaucccauagg

SEQ ID NO: 12445 - RNA, 19 nt, artificial
  Oligomer
aaugaaauaagguuucgac

SEQ ID NO: 12446 - RNA, 19 nt, artificial
  Oligomer
ugauugaaaacacaaugcc

SEQ ID NO: 12447 - RNA, 19 nt, artificial
  Oligomer
auccaguagaaauacaccu

SEQ ID NO: 12448 - RNA, 19 nt, artificial
  Oligomer
caguagaaauacaccuugc

SEQ ID NO: 12449 - RNA, 19 nt, artificial
  Oligomer
cacgcugaaaaagucuucc

SEQ ID NO: 12450 - RNA, 19 nt, artificial
  Oligomer
cuugccagaaaauugaggc

SEQ ID NO: 12451 - RNA, 19 nt, artificial
  Oligomer
gaacaacucauaggaggcc

SEQ ID NO: 12452 - RNA, 19 nt, artificial
  Oligomer
aacaacucauaggaggccu

SEQ ID NO: 12453 - RNA, 19 nt, artificial
  Oligomer
cuauuguccuuagcaauuc

SEQ ID NO: 12454 - RNA, 19 nt, artificial
  Oligomer
acucauuguuccaguuggg

SEQ ID NO: 12455 - RNA, 19 nt, artificial
  Oligomer
uucugcuuuaagccuguaa

SEQ ID NO: 12456 - RNA, 19 nt, artificial
  Oligomer
uaaagcuaugugaagagcc

SEQ ID NO: 12457 - RNA, 19 nt, artificial
  Oligomer
agcuaugugaagagccuga

SEQ ID NO: 12458 - RNA, 19 nt, artificial
  Oligomer
cugugccucacugcauuug

SEQ ID NO: 12459 - RNA, 19 nt, artificial
  Oligomer
cuuuuucaugugaaguucc

SEQ ID NO: 12460 - RNA, 19 nt, artificial
  Oligomer
uuucaugugaaguuccagg

SEQ ID NO: 12461 - RNA, 19 nt, artificial
  Oligomer
cuaaaauccauuuccaagc

SEQ ID NO: 12462 - RNA, 19 nt, artificial
  Oligomer
uugccagaaaauugaggca

SEQ ID NO: 12463 - RNA, 19 nt, artificial
  Oligomer
uuguuccucuuaugaauga

SEQ ID NO: 12464 - RNA, 19 nt, artificial
  Oligomer
aaauucaggcacagugcgg

SEQ ID NO: 12465 - RNA, 19 nt, artificial
  Oligomer
uguguaauggaaagacucc

SEQ ID NO: 12466 - RNA, 19 nt, artificial
  Oligomer
gaaguaugguauaguguac

SEQ ID NO: 12467 - RNA, 19 nt, artificial
  Oligomer
aaguaugguauaguguacu

SEQ ID NO: 12468 - RNA, 19 nt, artificial
  Oligomer
aguaugguauaguguacug

SEQ ID NO: 12469 - RNA, 19 nt, artificial
  Oligomer
uugaccuccaaagucuaga

SEQ ID NO: 12470 - RNA, 19 nt, artificial
  Oligomer
auuguaggcaaucugcuug

SEQ ID NO: 12471 - RNA, 19 nt, artificial
  Oligomer
auuguuccaguugggccuc

SEQ ID NO: 12472 - RNA, 19 nt, artificial
  Oligomer
aauaugguggagagacccu

SEQ ID NO: 12473 - RNA, 19 nt, artificial
  Oligomer
uggguagugaaauacaucu

SEQ ID NO: 12474 - RNA, 19 nt, artificial
  Oligomer
uuaaagccacgcuuuuuca

SEQ ID NO: 12475 - RNA, 19 nt, artificial
  Oligomer
acuucuuguugaaaucgcc

SEQ ID NO: 12476 - RNA, 19 nt, artificial
  Oligomer
uguugcucuucggcuguca

SEQ ID NO: 12477 - RNA, 19 nt, artificial
  Oligomer
aagacgaugaaaacauggu

SEQ ID NO: 12478 - RNA, 19 nt, artificial
  Oligomer
augaaaacauggugugugu

SEQ ID NO: 12479 - RNA, 19 nt, artificial
  Oligomer
aacaugguguguguaccag

SEQ ID NO: 12480 - RNA, 19 nt, artificial
  Oligomer
uugcccagcuuggaaagug

SEQ ID NO: 12481 - RNA, 19 nt, artificial
  Oligomer
aauucaggcacagugcgga

SEQ ID NO: 12482 - RNA, 19 nt, artificial
  Oligomer
ucguguguaauggaaagac

SEQ ID NO: 12483 - RNA, 19 nt, artificial
  Oligomer
cacaucuuuugaagugucc

SEQ ID NO: 12484 - RNA, 19 nt, artificial
  Oligomer
uuugaaguguccucgagag

SEQ ID NO: 12485 - RNA, 19 nt, artificial
  Oligomer
gugauuguaggcaaucugc

SEQ ID NO: 12486 - RNA, 19 nt, artificial
  Oligomer
agaguacuaauauggugga

SEQ ID NO: 12487 - RNA, 19 nt, artificial
  Oligomer
ugcuugaacucauuguucc

SEQ ID NO: 12488 - RNA, 19 nt, artificial
  Oligomer
gaguacuaauaugguggag

SEQ ID NO: 12489 - RNA, 19 nt, artificial
  Oligomer
aauccaguagaaauacacc

SEQ ID NO: 12490 - RNA, 19 nt, artificial
  Oligomer
acuuguugcucuucggcug

SEQ ID NO: 12491 - RNA, 19 nt, artificial
  Oligomer
gagacugucuuggguuugg

SEQ ID NO: 12492 - RNA, 19 nt, artificial
  Oligomer
uauuguccuuagcaauuca

SEQ ID NO: 12493 - RNA, 19 nt, artificial
  Oligomer
auuguccuuagcaauucag

SEQ ID NO: 12494 - RNA, 19 nt, artificial
  Oligomer
ugcagcaaauacuuguucc

SEQ ID NO: 12495 - RNA, 19 nt, artificial
  Oligomer
guguaauggaaagacuccu

SEQ ID NO: 12496 - RNA, 19 nt, artificial
  Oligomer
auggaaagacuccuccucu

SEQ ID NO: 12497 - RNA, 19 nt, artificial
  Oligomer
uucaccaguucccaacugg

SEQ ID NO: 12498 - RNA, 19 nt, artificial
  Oligomer
gagaguacuaauauggugg

SEQ ID NO: 12499 - RNA, 19 nt, artificial
  Oligomer
cucauuguuccaguugggc

SEQ ID NO: 12500 - RNA, 19 nt, artificial
  Oligomer
guaaagcuaugugaagagc

SEQ ID NO: 12501 - RNA, 19 nt, artificial
  Oligomer
uuaguaagggcuucccuag

SEQ ID NO: 12502 - RNA, 19 nt, artificial
  Oligomer
ggguagugaaauacaucug

SEQ ID NO: 12503 - RNA, 19 nt, artificial
  Oligomer
acgcugaaaaagucuuccu

SEQ ID NO: 12504 - RNA, 19 nt, artificial
  Oligomer
ugugaaguuccaggacucc

SEQ ID NO: 12505 - RNA, 19 nt, artificial
  Oligomer
auucugcauagcggucucu

SEQ ID NO: 12506 - RNA, 19 nt, artificial
  Oligomer
gagagagacugucuugggu

SEQ ID NO: 12507 - RNA, 19 nt, artificial
  Oligomer
agacugucuuggguuuggc

SEQ ID NO: 12508 - RNA, 19 nt, artificial
  Oligomer
gaagacgaugaaaacaugg

SEQ ID NO: 12509 - RNA, 19 nt, artificial
  Oligomer
agaacaacucauaggaggc

SEQ ID NO: 12510 - RNA, 19 nt, artificial
  Oligomer
aagguuucgacugacaggu

SEQ ID NO: 12511 - RNA, 19 nt, artificial
  Oligomer
auaacucguguguaaugga

SEQ ID NO: 12512 - RNA, 19 nt, artificial
  Oligomer
cuuuugaaguguccucgag

SEQ ID NO: 12513 - RNA, 19 nt, artificial
  Oligomer
cauuguuccaguugggccu

SEQ ID NO: 12514 - RNA, 19 nt, artificial
  Oligomer
uagaaggucuucugcuuua

SEQ ID NO: 12515 - RNA, 19 nt, artificial
  Oligomer
ucccaguguaaagcuaugu

SEQ ID NO: 12516 - RNA, 19 nt, artificial
  Oligomer
ccaguguaaagcuauguga

SEQ ID NO: 12517 - RNA, 19 nt, artificial
  Oligomer
ucagaaagugaguuuuccc

SEQ ID NO: 12518 - RNA, 19 nt, artificial
  Oligomer
ccaguagaaauacaccuug

SEQ ID NO: 12519 - RNA, 19 nt, artificial
  Oligomer
acacuggguagugaaauac

SEQ ID NO: 12520 - RNA, 19 nt, artificial
  Oligomer
guagugaaauacaucuguc

SEQ ID NO: 12521 - RNA, 19 nt, artificial
  Oligomer
auuuccaagccgaggguuc

SEQ ID NO: 12522 - RNA, 19 nt, artificial
  Oligomer
ugccagaaaauugaggcac

SEQ ID NO: 12523 - RNA, 19 nt, artificial
  Oligomer
agacgaugaaaacauggug

SEQ ID NO: 12524 - RNA, 19 nt, artificial
  Oligomer
gacgaugaaaacauggugu

SEQ ID NO: 12525 - RNA, 19 nt, artificial
  Oligomer
guguguaccagaacaacuc

SEQ ID NO: 12526 - RNA, 19 nt, artificial
  Oligomer
ugucugaugaacucaguug

SEQ ID NO: 12527 - RNA, 19 nt, artificial
  Oligomer
aacucaguugacgagguca

SEQ ID NO: 12528 - RNA, 19 nt, artificial
  Oligomer
aaaugcgccacgaugugga

SEQ ID NO: 12529 - RNA, 19 nt, artificial
  Oligomer
uugcauuaacagcuauccc

SEQ ID NO: 12530 - RNA, 19 nt, artificial
  Oligomer
agguuuuugucuaauugcc

SEQ ID NO: 12531 - RNA, 19 nt, artificial
  Oligomer
cuugaacucauuguuccag

SEQ ID NO: 12532 - RNA, 19 nt, artificial
  Oligomer
aggucuucugcuuuaagcc

SEQ ID NO: 12533 - RNA, 19 nt, artificial
  Oligomer
uuuccagggagaguaagag

SEQ ID NO: 12534 - RNA, 19 nt, artificial
  Oligomer
gcacgcugaaaaagucuuc

SEQ ID NO: 12535 - RNA, 19 nt, artificial
  Oligomer
acuccagcgaagauauggc

SEQ ID NO: 12536 - RNA, 19 nt, artificial
  Oligomer
cuggcgccauuuuaaagcc

SEQ ID NO: 12537 - RNA, 19 nt, artificial
  Oligomer
uuuucaugugaaguuccag

SEQ ID NO: 12538 - RNA, 19 nt, artificial
  Oligomer
cagagagagacugucuugg

SEQ ID NO: 12539 - RNA, 19 nt, artificial
  Oligomer
uuuggccucgaacaauccg

SEQ ID NO: 12540 - RNA, 19 nt, artificial
  Oligomer
acgaugaaaacauggugug

SEQ ID NO: 12541 - RNA, 19 nt, artificial
  Oligomer
gaacucaguugacgagguc

SEQ ID NO: 12542 - RNA, 19 nt, artificial
  Oligomer
uugacgaggucaugaucaa

SEQ ID NO: 12543 - RNA, 19 nt, artificial
  Oligomer
acgaggucaugaucaagac

SEQ ID NO: 12544 - RNA, 19 nt, artificial
  Oligomer
uugagguagcucucguuag

SEQ ID NO: 12545 - RNA, 19 nt, artificial
  Oligomer
ugaaaucugagguuuuugu

SEQ ID NO: 12546 - RNA, 19 nt, artificial
  Oligomer
uucgacugacagguauuag

SEQ ID NO: 12547 - RNA, 19 nt, artificial
  Oligomer
gucguuaguaagggcuucc

SEQ ID NO: 12548 - RNA, 19 nt, artificial
  Oligomer
guccucgagagagcuuuag

SEQ ID NO: 12549 - RNA, 19 nt, artificial
  Oligomer
ucccauagaaggucuucug

SEQ ID NO: 12550 - RNA, 19 nt, artificial
  Oligomer
cuaauaugguggagagacc

SEQ ID NO: 12551 - RNA, 19 nt, artificial
  Oligomer
ugauaacucagaaagugag

SEQ ID NO: 12552 - RNA, 19 nt, artificial
  Oligomer
uaacucagaaagugaguuu

SEQ ID NO: 12553 - RNA, 19 nt, artificial
  Oligomer
cucagaaagugaguuuucc

SEQ ID NO: 12554 - RNA, 19 nt, artificial
  Oligomer
gguagugaaauacaucugu

SEQ ID NO: 12555 - RNA, 19 nt, artificial
  Oligomer
aaauacaucugucagggca

SEQ ID NO: 12556 - RNA, 19 nt, artificial
  Oligomer
aagccacgcuuuuucaugu

SEQ ID NO: 12557 - RNA, 19 nt, artificial
  Oligomer
uacuuguugcucuucggcu

SEQ ID NO: 12558 - RNA, 19 nt, artificial
  Oligomer
ccuugccagaaaauugagg

SEQ ID NO: 12559 - RNA, 19 nt, artificial
  Oligomer
aaacaugguguguguacca

SEQ ID NO: 12560 - RNA, 19 nt, artificial
  Oligomer
ucaggaaauuucuucuccc

SEQ ID NO: 12561 - RNA, 19 nt, artificial
  Oligomer
gucugaugaacucaguuga

SEQ ID NO: 12562 - RNA, 19 nt, artificial
  Oligomer
accaguuugugaaaucuga

SEQ ID NO: 12563 - RNA, 19 nt, artificial
  Oligomer
ucuguuguauaugacaugu

SEQ ID NO: 12564 - RNA, 19 nt, artificial
  Oligomer
agcuaaggaaguaugguau

SEQ ID NO: 12565 - RNA, 19 nt, artificial
  Oligomer
guauaguguacuguucaca

SEQ ID NO: 12566 - RNA, 19 nt, artificial
  Oligomer
uucccagccaugagaguac

SEQ ID NO: 12567 - RNA, 19 nt, artificial
  Oligomer
cucccauagaaggucuucu

SEQ ID NO: 12568 - RNA, 19 nt, artificial
  Oligomer
uaugguggagagacccuca

SEQ ID NO: 12569 - RNA, 19 nt, artificial
  Oligomer
gagaucagcaaaccacuca

SEQ ID NO: 12570 - RNA, 19 nt, artificial
  Oligomer
gcuuuuucaugugaaguuc

SEQ ID NO: 12571 - RNA, 19 nt, artificial
  Oligomer
augugaaguuccaggacuc

SEQ ID NO: 12572 - RNA, 19 nt, artificial
  Oligomer
cuuaccaccuugguaauga

SEQ ID NO: 12573 - RNA, 19 nt, artificial
  Oligomer
uuaccaccuugguaaugac

SEQ ID NO: 12574 - RNA, 19 nt, artificial
  Oligomer
cauucugcauagcggucuc

SEQ ID NO: 12575 - RNA, 19 nt, artificial
  Oligomer
agagagagacugucuuggg

SEQ ID NO: 12576 - RNA, 19 nt, artificial
  Oligomer
guuuggccucgaacaaucc

SEQ ID NO: 12577 - RNA, 19 nt, artificial
  Oligomer
gucaggaaauuucuucucc

SEQ ID NO: 12578 - RNA, 19 nt, artificial
  Oligomer
cagaacaacucauaggagg

SEQ ID NO: 12579 - RNA, 19 nt, artificial
  Oligomer
augaacucaguugacgagg

SEQ ID NO: 12580 - RNA, 19 nt, artificial
  Oligomer
guugcauuaacagcuaucc

SEQ ID NO: 12581 - RNA, 19 nt, artificial
  Oligomer
auaagguuucgacugacag

SEQ ID NO: 12582 - RNA, 19 nt, artificial
  Oligomer
uagcaugcaguuaaaauuc

SEQ ID NO: 12583 - RNA, 19 nt, artificial
  Oligomer
aaaauucaggcacagugcg

SEQ ID NO: 12584 - RNA, 19 nt, artificial
  Oligomer
ugggucguuaguaagggcu

SEQ ID NO: 12585 - RNA, 19 nt, artificial
  Oligomer
uaagcuaaggaaguauggu

SEQ ID NO: 12586 - RNA, 19 nt, artificial
  Oligomer
auucaccaguucccaacug

SEQ ID NO: 12587 - RNA, 19 nt, artificial
  Oligomer
uuauucccagccaugagag

SEQ ID NO: 12588 - RNA, 19 nt, artificial
  Oligomer
gacuugaccuccaaagucu

SEQ ID NO: 12589 - RNA, 19 nt, artificial
  Oligomer
uggcacaucuuuugaagug

SEQ ID NO: 12590 - RNA, 19 nt, artificial
  Oligomer
guacuaauaugguggagag

SEQ ID NO: 12591 - RNA, 19 nt, artificial
  Oligomer
cuccagcgaagauauggcu

SEQ ID NO: 12592 - RNA, 19 nt, artificial
  Oligomer
acugcaccaagauguacug

SEQ ID NO: 12593 - RNA, 19 nt, artificial
  Oligomer
agccacgcuuuuucaugug

SEQ ID NO: 12594 - RNA, 19 nt, artificial
  Oligomer
ugaaguuccaggacuccag

SEQ ID NO: 12595 - RNA, 19 nt, artificial
  Oligomer
ugucugccauucugcauag

SEQ ID NO: 12596 - RNA, 19 nt, artificial
  Oligomer
ucugccauucugcauagcg

SEQ ID NO: 12597 - RNA, 19 nt, artificial
  Oligomer
uagcguuccagguugaaga

SEQ ID NO: 12598 - RNA, 19 nt, artificial
  Oligomer
gaugguugcauuaacagcu

SEQ ID NO: 12599 - RNA, 19 nt, artificial
  Oligomer
auaggcgaccaguuuguga

SEQ ID NO: 12600 - RNA, 19 nt, artificial
  Oligomer
gaaaucugagguuuuuguc

SEQ ID NO: 12601 - RNA, 19 nt, artificial
  Oligomer
aguguacuguucacaauag

SEQ ID NO: 12602 - RNA, 19 nt, artificial
  Oligomer
gagagagcuuuagguccac

SEQ ID NO: 12603 - RNA, 19 nt, artificial
  Oligomer
auaacucagaaagugaguu

SEQ ID NO: 12604 - RNA, 19 nt, artificial
  Oligomer
aacucagaaagugaguuuu

SEQ ID NO: 12605 - RNA, 19 nt, artificial
  Oligomer
ucauccguguuuccaggga

SEQ ID NO: 12606 - RNA, 19 nt, artificial
  Oligomer
aguagaaauacaccuugcu

SEQ ID NO: 12607 - RNA, 19 nt, artificial
  Oligomer
ugugcacgcugaaaaaguc

SEQ ID NO: 12608 - RNA, 19 nt, artificial
  Oligomer
cacuccagcgaagauaugg

SEQ ID NO: 12609 - RNA, 19 nt, artificial
  Oligomer
ugcaccaagauguacugcc

SEQ ID NO: 12610 - RNA, 19 nt, artificial
  Oligomer
uggcgccauuuuaaagcca

SEQ ID NO: 12611 - RNA, 19 nt, artificial
  Oligomer
gaugaacucaguugacgag

SEQ ID NO: 12612 - RNA, 19 nt, artificial
  Oligomer
cagguugaagaaaugcgcc

SEQ ID NO: 12613 - RNA, 19 nt, artificial
  Oligomer
agguugaagaaaugcgcca

SEQ ID NO: 12614 - RNA, 19 nt, artificial
  Oligomer
augguugcauuaacagcua

SEQ ID NO: 12615 - RNA, 19 nt, artificial
  Oligomer
aacagcuaucccauaggcg

SEQ ID NO: 12616 - RNA, 19 nt, artificial
  Oligomer
uaggcgaccaguuugugaa

SEQ ID NO: 12617 - RNA, 19 nt, artificial
  Oligomer
uaauugccuccuccacggu

SEQ ID NO: 12618 - RNA, 19 nt, artificial
  Oligomer
cucugcagcaaauacuugu

SEQ ID NO: 12619 - RNA, 19 nt, artificial
  Oligomer
cugcagcaaauacuuguuc

SEQ ID NO: 12620 - RNA, 19 nt, artificial
  Oligomer
guaaugacaacuucuuguu

SEQ ID NO: 12621 - RNA, 19 nt, artificial
  Oligomer
caacuucuuguugaaaucg

SEQ ID NO: 12622 - RNA, 19 nt, artificial
  Oligomer
gggccuaaaauccauuucc

SEQ ID NO: 12623 - RNA, 19 nt, artificial
  Oligomer
uaggaggccugucugauga

SEQ ID NO: 12624 - RNA, 19 nt, artificial
  Oligomer
cugaugaacucaguugacg

SEQ ID NO: 12625 - RNA, 19 nt, artificial
  Oligomer
acaggguugagguagcucu

SEQ ID NO: 12626 - RNA, 19 nt, artificial
  Oligomer
gaaauaagguuucgacuga

SEQ ID NO: 12627 - RNA, 19 nt, artificial
  Oligomer
aauaagguuucgacugaca

SEQ ID NO: 12628 - RNA, 19 nt, artificial
  Oligomer
agcucauaucaacaggccg

SEQ ID NO: 12629 - RNA, 19 nt, artificial
  Oligomer
cuugauugaaaacacaaug

SEQ ID NO: 12630 - RNA, 19 nt, artificial
  Oligomer
ucgagagagcuuuaggucc

SEQ ID NO: 12631 - RNA, 19 nt, artificial
  Oligomer
aaggucuucugcuuuaagc

SEQ ID NO: 12632 - RNA, 19 nt, artificial
  Oligomer
agggccuaaaauccauuuc

SEQ ID NO: 12633 - RNA, 19 nt, artificial
  Oligomer
uugugcagagagagacugu

SEQ ID NO: 12634 - RNA, 19 nt, artificial
  Oligomer
ugagguagcucucguuagg

SEQ ID NO: 12635 - RNA, 19 nt, artificial
  Oligomer
ugaaugaaauaagguuucg

SEQ ID NO: 12636 - RNA, 19 nt, artificial
  Oligomer
aauacaucugucagggcag

SEQ ID NO: 12637 - RNA, 19 nt, artificial
  Oligomer
cugcaccaagauguacugc

SEQ ID NO: 12638 - RNA, 19 nt, artificial
  Oligomer
uuagcaauucagugguugu

SEQ ID NO: 12639 - RNA, 19 nt, artificial
  Oligomer
ggaaucaauaacuugauug

SEQ ID NO: 12640 - RNA, 19 nt, artificial
  Oligomer
ugugcagagagagacuguc

SEQ ID NO: 12641 - RNA, 19 nt, artificial
  Oligomer
aaugacaacuucuuguuga

SEQ ID NO: 12642 - RNA, 19 nt, artificial
  Oligomer
auacaagaccacagggccu

SEQ ID NO: 12643 - RNA, 19 nt, artificial
  Oligomer
uacaagaccacagggccua

SEQ ID NO: 12644 - RNA, 19 nt, artificial
  Oligomer
cugucaggaaauuucuucu

SEQ ID NO: 12645 - RNA, 19 nt, artificial
  Oligomer
uaacagcuaucccauaggc

SEQ ID NO: 12646 - RNA, 19 nt, artificial
  Oligomer
augacaacuucuuguugaa

SEQ ID NO: 12647 - RNA, 19 nt, artificial
  Oligomer
uaaugacaacuucuuguug

SEQ ID NO: 12648 - RNA, 19 nt, artificial
  Oligomer
gaaugaaauaagguuucga

SEQ ID NO: 12649 - RNA, 19 nt, artificial
  Oligomer
accugugucuggauguugg

SEQ ID NO: 12650 - RNA, 19 nt, artificial
  Oligomer
agcaaauacuuguuccucu

SEQ ID NO: 12651 - RNA, 19 nt, artificial
  Oligomer
ucuuguugaaaucgccaga

SEQ ID NO: 12652 - RNA, 19 nt, artificial
  Oligomer
uguuugugugccugcugga

SEQ ID NO: 12653 - RNA, 19 nt, artificial
  Oligomer
cuuuggugccuacuccauu

SEQ ID NO: 12654 - RNA, 19 nt, artificial
  Oligomer
cuuuaccaggaauuacuau

SEQ ID NO: 12655 - RNA, 19 nt, artificial
  Oligomer
caggaauuacuauguucgg

SEQ ID NO: 12656 - RNA, 19 nt, artificial
  Oligomer
uacuuuggugccuacucca

SEQ ID NO: 12657 - RNA, 19 nt, artificial
  Oligomer
gguacuuuggugccuacuc

SEQ ID NO: 12658 - RNA, 19 nt, artificial
  Oligomer
cacccagugguacuuuggu

SEQ ID NO: 12659 - RNA, 19 nt, artificial
  Oligomer
aagcuguucgggcccuuua

SEQ ID NO: 12660 - RNA, 19 nt, artificial
  Oligomer
gggacagaaguacaugacc

SEQ ID NO: 12661 - RNA, 19 nt, artificial
  Oligomer
acuuuggugccuacuccau

SEQ ID NO: 12662 - RNA, 19 nt, artificial
  Oligomer
gaauuacuauguucgggcc

SEQ ID NO: 12663 - RNA, 19 nt, artificial
  Oligomer
aagaggaagaagggcucca

SEQ ID NO: 12664 - RNA, 19 nt, artificial
  Oligomer
uuugugugccugcuggagu

SEQ ID NO: 12665 - RNA, 19 nt, artificial
  Oligomer
gacagaaguacaugaccgc

SEQ ID NO: 12666 - RNA, 19 nt, artificial
  Oligomer
aggaauuacuauguucggg

SEQ ID NO: 12667 - RNA, 19 nt, artificial
  Oligomer
guacuuuggugccuacucc

SEQ ID NO: 12668 - RNA, 19 nt, artificial
  Oligomer
auuacuauguucgggccgu

SEQ ID NO: 12669 - RNA, 19 nt, artificial
  Oligomer
cuucacccagugguacuuu

SEQ ID NO: 12670 - RNA, 19 nt, artificial
  Oligomer
ugguacuuuggugccuacu

SEQ ID NO: 12671 - RNA, 19 nt, artificial
  Oligomer
uucacccagugguacuuug

SEQ ID NO: 12672 - RNA, 19 nt, artificial
  Oligomer
uuacuauguucgggccguc

SEQ ID NO: 12673 - RNA, 19 nt, artificial
  Oligomer
uggugccuacuccauugug

SEQ ID NO: 12674 - RNA, 19 nt, artificial
  Oligomer
uuuaccaggaauuacuaug

SEQ ID NO: 12675 - RNA, 19 nt, artificial
  Oligomer
ucacccagugguacuuugg

SEQ ID NO: 12676 - RNA, 19 nt, artificial
  Oligomer
aauuacuauguucgggccg

SEQ ID NO: 12677 - RNA, 19 nt, artificial
  Oligomer
uuggugccuacuccauugu

SEQ ID NO: 12678 - RNA, 19 nt, artificial
  Oligomer
acagaaguacaugaccgcc

SEQ ID NO: 12679 - RNA, 19 nt, artificial
  Oligomer
uccagcaggcacacaaaca

SEQ ID NO: 12680 - RNA, 19 nt, artificial
  Oligomer
aauggaguaggcaccaaag

SEQ ID NO: 12681 - RNA, 19 nt, artificial
  Oligomer
auaguaauuccugguaaag

SEQ ID NO: 12682 - RNA, 19 nt, artificial
  Oligomer
ccgaacauaguaauuccug

SEQ ID NO: 12683 - RNA, 19 nt, artificial
  Oligomer
uggaguaggcaccaaagua

SEQ ID NO: 12684 - RNA, 19 nt, artificial
  Oligomer
gaguaggcaccaaaguacc

SEQ ID NO: 12685 - RNA, 19 nt, artificial
  Oligomer
accaaaguaccacugggug

SEQ ID NO: 12686 - RNA, 19 nt, artificial
  Oligomer
uaaagggcccgaacagcuu

SEQ ID NO: 12687 - RNA, 19 nt, artificial
  Oligomer
ggucauguacuucuguccc

SEQ ID NO: 12688 - RNA, 19 nt, artificial
  Oligomer
auggaguaggcaccaaagu

SEQ ID NO: 12689 - RNA, 19 nt, artificial
  Oligomer
ggcccgaacauaguaauuc

SEQ ID NO: 12690 - RNA, 19 nt, artificial
  Oligomer
uggagcccuucuuccucuu

SEQ ID NO: 12691 - RNA, 19 nt, artificial
  Oligomer
acuccagcaggcacacaaa

SEQ ID NO: 12692 - RNA, 19 nt, artificial
  Oligomer
gcggucauguacuucuguc

SEQ ID NO: 12693 - RNA, 19 nt, artificial
  Oligomer
cccgaacauaguaauuccu

SEQ ID NO: 12694 - RNA, 19 nt, artificial
  Oligomer
ggaguaggcaccaaaguac

SEQ ID NO: 12695 - RNA, 19 nt, artificial
  Oligomer
acggcccgaacauaguaau

SEQ ID NO: 12696 - RNA, 19 nt, artificial
  Oligomer
aaaguaccacugggugaag

SEQ ID NO: 12697 - RNA, 19 nt, artificial
  Oligomer
aguaggcaccaaaguacca

SEQ ID NO: 12698 - RNA, 19 nt, artificial
  Oligomer
caaaguaccacugggugaa

SEQ ID NO: 12699 - RNA, 19 nt, artificial
  Oligomer
gacggcccgaacauaguaa

SEQ ID NO: 12700 - RNA, 19 nt, artificial
  Oligomer
cacaauggaguaggcacca

SEQ ID NO: 12701 - RNA, 19 nt, artificial
  Oligomer
cauaguaauuccugguaaa

SEQ ID NO: 12702 - RNA, 19 nt, artificial
  Oligomer
ccaaaguaccacuggguga

SEQ ID NO: 12703 - RNA, 19 nt, artificial
  Oligomer
cggcccgaacauaguaauu

SEQ ID NO: 12704 - RNA, 19 nt, artificial
  Oligomer
acaauggaguaggcaccaa

SEQ ID NO: 12705 - RNA, 19 nt, artificial
  Oligomer
ggcggucauguacuucugu

SEQ ID NO: 12706 - RNA, 19 nt, artificial
  Oligomer
ccacaacuaauuucaccca

SEQ ID NO: 12707 - RNA, 19 nt, artificial
  Oligomer
cauggaugcuggcaucuua

SEQ ID NO: 12708 - RNA, 19 nt, artificial
  Oligomer
gagacagcucagcacugaa

SEQ ID NO: 12709 - RNA, 19 nt, artificial
  Oligomer
agucuaacaccacaacuaa

SEQ ID NO: 12710 - RNA, 19 nt, artificial
  Oligomer
caucaaucggaacucaagu

SEQ ID NO: 12711 - RNA, 19 nt, artificial
  Oligomer
guguaaggaugcaguggga

SEQ ID NO: 12712 - RNA, 19 nt, artificial
  Oligomer
cggugaguguaaggaugca

SEQ ID NO: 12713 - RNA, 19 nt, artificial
  Oligomer
uggagaucagcguggugaa

SEQ ID NO: 12714 - RNA, 19 nt, artificial
  Oligomer
cauugagacugaguugaca

SEQ ID NO: 12715 - RNA, 19 nt, artificial
  Oligomer
caucguccucacagucuua

SEQ ID NO: 12716 - RNA, 19 nt, artificial
  Oligomer
ucaucaaucggaacucaag

SEQ ID NO: 12717 - RNA, 19 nt, artificial
  Oligomer
gaugugccagauacccaaa

SEQ ID NO: 12718 - RNA, 19 nt, artificial
  Oligomer
cuauuuugagggcagugga

SEQ ID NO: 12719 - RNA, 19 nt, artificial
  Oligomer
ccuauuucuggcugccuca

SEQ ID NO: 12720 - RNA, 19 nt, artificial
  Oligomer
gagauugaagaaauccgaa

SEQ ID NO: 12721 - RNA, 19 nt, artificial
  Oligomer
guccuugaacaauuugugc

SEQ ID NO: 12722 - RNA, 19 nt, artificial
  Oligomer
ccaauaccuauguaugcaa

SEQ ID NO: 12723 - RNA, 19 nt, artificial
  Oligomer
acaucacacgggcaucaca

SEQ ID NO: 12724 - RNA, 19 nt, artificial
  Oligomer
gucuaacaccacaacuaau

SEQ ID NO: 12725 - RNA, 19 nt, artificial
  Oligomer
cugauuucccaccucccaa

SEQ ID NO: 12726 - RNA, 19 nt, artificial
  Oligomer
gcaugaccaagaaugugga

SEQ ID NO: 12727 - RNA, 19 nt, artificial
  Oligomer
ccauggcaagccauuuaca

SEQ ID NO: 12728 - RNA, 19 nt, artificial
  Oligomer
agaagguaacgucauucca

SEQ ID NO: 12729 - RNA, 19 nt, artificial
  Oligomer
uggcaagaagguaacguca

SEQ ID NO: 12730 - RNA, 19 nt, artificial
  Oligomer
gagguuuggcaagaaggua

SEQ ID NO: 12731 - RNA, 19 nt, artificial
  Oligomer
cacgcagcucugugucaaa

SEQ ID NO: 12732 - RNA, 19 nt, artificial
  Oligomer
caugaccaagaauguggaa

SEQ ID NO: 12733 - RNA, 19 nt, artificial
  Oligomer
cagacggugcaacaguuca

SEQ ID NO: 12734 - RNA, 19 nt, artificial
  Oligomer
ggcuguucuccaagaagga

SEQ ID NO: 12735 - RNA, 19 nt, artificial
  Oligomer
aacaaaucucagaagacaa

SEQ ID NO: 12736 - RNA, 19 nt, artificial
  Oligomer
gugucucagccuggagaaa

SEQ ID NO: 12737 - RNA, 19 nt, artificial
  Oligomer
gauuugaugggugguacaa

SEQ ID NO: 12738 - RNA, 19 nt, artificial
  Oligomer
gguucugaaccggagucua

SEQ ID NO: 12739 - RNA, 19 nt, artificial
  Oligomer
guuugaggugucaguguua

SEQ ID NO: 12740 - RNA, 19 nt, artificial
  Oligomer
ccuacaucagccaggauau

SEQ ID NO: 12741 - RNA, 19 nt, artificial
  Oligomer
guuugagaacaccaggaau

SEQ ID NO: 12742 - RNA, 19 nt, artificial
  Oligomer
aacccucccuacucccaua

SEQ ID NO: 12743 - RNA, 19 nt, artificial
  Oligomer
ggaugcuggcaucuuagaa

SEQ ID NO: 12744 - RNA, 19 nt, artificial
  Oligomer
caaccucauggagcacaga

SEQ ID NO: 12745 - RNA, 19 nt, artificial
  Oligomer
uuugaugggugguacaaca

SEQ ID NO: 12746 - RNA, 19 nt, artificial
  Oligomer
aaguguucuguaagaagau

SEQ ID NO: 12747 - RNA, 19 nt, artificial
  Oligomer
cagaugugccagauaccca

SEQ ID NO: 12748 - RNA, 19 nt, artificial
  Oligomer
guagcuuugcccugaucca

SEQ ID NO: 12749 - RNA, 19 nt, artificial
  Oligomer
gaagcuuuggaauggcaag

SEQ ID NO: 12750 - RNA, 19 nt, artificial
  Oligomer
cuuuugccuccauccucaa

SEQ ID NO: 12751 - RNA, 19 nt, artificial
  Oligomer
cccagggcuuugaguacaa

SEQ ID NO: 12752 - RNA, 19 nt, artificial
  Oligomer
gggaauggccucauuucca

SEQ ID NO: 12753 - RNA, 19 nt, artificial
  Oligomer
caggauaccggccauuucu

SEQ ID NO: 12754 - RNA, 19 nt, artificial
  Oligomer
agaacaucgcuguguauga

SEQ ID NO: 12755 - RNA, 19 nt, artificial
  Oligomer
guucugaaccggagucuau

SEQ ID NO: 12756 - RNA, 19 nt, artificial
  Oligomer
ucaugaaaggcucuccuga

SEQ ID NO: 12757 - RNA, 19 nt, artificial
  Oligomer
cuuugucuggcauaaagga

SEQ ID NO: 12758 - RNA, 19 nt, artificial
  Oligomer
ugaaguuuucccgcacaga

SEQ ID NO: 12759 - RNA, 19 nt, artificial
  Oligomer
ucugguuccgcuaccacaa

SEQ ID NO: 12760 - RNA, 19 nt, artificial
  Oligomer
cagucuaacaccacaacua

SEQ ID NO: 12761 - RNA, 19 nt, artificial
  Oligomer
agccauuuacagaaaccca

SEQ ID NO: 12762 - RNA, 19 nt, artificial
  Oligomer
cagaagguucugaaccgga

SEQ ID NO: 12763 - RNA, 19 nt, artificial
  Oligomer
aauuugugcggcuacggga

SEQ ID NO: 12764 - RNA, 19 nt, artificial
  Oligomer
caaucggaacucaaguguc

SEQ ID NO: 12765 - RNA, 19 nt, artificial
  Oligomer
uaauuucacccaagguuuu

SEQ ID NO: 12766 - RNA, 19 nt, artificial
  Oligomer
acaccacaacuaauuucac

SEQ ID NO: 12767 - RNA, 19 nt, artificial
  Oligomer
gaagguucugaaccggagu

SEQ ID NO: 12768 - RNA, 19 nt, artificial
  Oligomer
caugguagcuuugcccuga

SEQ ID NO: 12769 - RNA, 19 nt, artificial
  Oligomer
uggagagggccuacuacua

SEQ ID NO: 12770 - RNA, 19 nt, artificial
  Oligomer
gugcuuucagaccugguga

SEQ ID NO: 12771 - RNA, 19 nt, artificial
  Oligomer
aguagucucccuuccaaau

SEQ ID NO: 12772 - RNA, 19 nt, artificial
  Oligomer
ccuuagcaacaccaucuca

SEQ ID NO: 12773 - RNA, 19 nt, artificial
  Oligomer
gcugaccugacaaguacua

SEQ ID NO: 12774 - RNA, 19 nt, artificial
  Oligomer
cugcuuccagacuucagaa

SEQ ID NO: 12775 - RNA, 19 nt, artificial
  Oligomer
uggucccagcaaucaucua

SEQ ID NO: 12776 - RNA, 19 nt, artificial
  Oligomer
gaagguaacgucauuccag

SEQ ID NO: 12777 - RNA, 19 nt, artificial
  Oligomer
aggaugaguucaucaggau

SEQ ID NO: 12778 - RNA, 19 nt, artificial
  Oligomer
aaggaugaguucaucagga

SEQ ID NO: 12779 - RNA, 19 nt, artificial
  Oligomer
ccauguucucucuggcuga

SEQ ID NO: 12780 - RNA, 19 nt, artificial
  Oligomer
gaaauaccacccugcagga

SEQ ID NO: 12781 - RNA, 19 nt, artificial
  Oligomer
ucaucgccaccuaccagaa

SEQ ID NO: 12782 - RNA, 19 nt, artificial
  Oligomer
cuauguaugcaaugcuccu

SEQ ID NO: 12783 - RNA, 19 nt, artificial
  Oligomer
aacaccacaacuaauuuca

SEQ ID NO: 12784 - RNA, 19 nt, artificial
  Oligomer
ccuuugagcccuucuucaa

SEQ ID NO: 12785 - RNA, 19 nt, artificial
  Oligomer
uguacaucugugagcggca

SEQ ID NO: 12786 - RNA, 19 nt, artificial
  Oligomer
gugucugugcacaucuaca

SEQ ID NO: 12787 - RNA, 19 nt, artificial
  Oligomer
gacaaggaggaacugacau

SEQ ID NO: 12788 - RNA, 19 nt, artificial
  Oligomer
aaggcucuccugaggaaaa

SEQ ID NO: 12789 - RNA, 19 nt, artificial
  Oligomer
ccuugaacaauuugugcgg

SEQ ID NO: 12790 - RNA, 19 nt, artificial
  Oligomer
cucuguucagcaccaucgu

SEQ ID NO: 12791 - RNA, 19 nt, artificial
  Oligomer
aguuuucccgcacagacca

SEQ ID NO: 12792 - RNA, 19 nt, artificial
  Oligomer
aagugcugaagauguggau

SEQ ID NO: 12793 - RNA, 19 nt, artificial
  Oligomer
aagccuacaaagugcugaa

SEQ ID NO: 12794 - RNA, 19 nt, artificial
  Oligomer
gugaguguaaggaugcagu

SEQ ID NO: 12795 - RNA, 19 nt, artificial
  Oligomer
caaguacuaugugugugca

SEQ ID NO: 12796 - RNA, 19 nt, artificial
  Oligomer
ggugucaguguuaguggga

SEQ ID NO: 12797 - RNA, 19 nt, artificial
  Oligomer
uccugauccuggccaucau

SEQ ID NO: 12798 - RNA, 19 nt, artificial
  Oligomer
ucguccucacagucuuaca

SEQ ID NO: 12799 - RNA, 19 nt, artificial
  Oligomer
agcccuugcuguucacuga

SEQ ID NO: 12800 - RNA, 19 nt, artificial
  Oligomer
gaaaagucucgccuuaugu

SEQ ID NO: 12801 - RNA, 19 nt, artificial
  Oligomer
caaggauggcaauggcuac

SEQ ID NO: 12802 - RNA, 19 nt, artificial
  Oligomer
ccuuuuucaggcaccuuuu

SEQ ID NO: 12803 - RNA, 19 nt, artificial
  Oligomer
augccuugcaggagguaga

SEQ ID NO: 12804 - RNA, 19 nt, artificial
  Oligomer
cuuguuccagguggccaua

SEQ ID NO: 12805 - RNA, 19 nt, artificial
  Oligomer
acaucauccgagaggugga

SEQ ID NO: 12806 - RNA, 19 nt, artificial
  Oligomer
uggcugacaucauccgaga

SEQ ID NO: 12807 - RNA, 19 nt, artificial
  Oligomer
gccagauacccaaagcugu

SEQ ID NO: 12808 - RNA, 19 nt, artificial
  Oligomer
cuuccaugaugaugggucu

SEQ ID NO: 12809 - RNA, 19 nt, artificial
  Oligomer
aguucaagcgcuucauuga

SEQ ID NO: 12810 - RNA, 19 nt, artificial
  Oligomer
acaaggauggcaauggcua

SEQ ID NO: 12811 - RNA, 19 nt, artificial
  Oligomer
uauuuugagggcaguggau

SEQ ID NO: 12812 - RNA, 19 nt, artificial
  Oligomer
aacuaauuucacccaaggu

SEQ ID NO: 12813 - RNA, 19 nt, artificial
  Oligomer
ccugacaaguacuaugugu

SEQ ID NO: 12814 - RNA, 19 nt, artificial
  Oligomer
agcugaccugacaaguacu

SEQ ID NO: 12815 - RNA, 19 nt, artificial
  Oligomer
caccauuaugagaacuucu

SEQ ID NO: 12816 - RNA, 19 nt, artificial
  Oligomer
cccuggcaugaccaagaau

SEQ ID NO: 12817 - RNA, 19 nt, artificial
  Oligomer
gugacagaugugccagaua

SEQ ID NO: 12818 - RNA, 19 nt, artificial
  Oligomer
ugauccuggccaucaugua

SEQ ID NO: 12819 - RNA, 19 nt, artificial
  Oligomer
aaguauuacuggugguucu

SEQ ID NO: 12820 - RNA, 19 nt, artificial
  Oligomer
aucacacgggcaucacaga

SEQ ID NO: 12821 - RNA, 19 nt, artificial
  Oligomer
agacugaguugacaccuca

SEQ ID NO: 12822 - RNA, 19 nt, artificial
  Oligomer
aacugacaugggaagauuu

SEQ ID NO: 12823 - RNA, 19 nt, artificial
  Oligomer
aguuccucaacauucgcau

SEQ ID NO: 12824 - RNA, 19 nt, artificial
  Oligomer
ucuucucccugcuccagua

SEQ ID NO: 12825 - RNA, 19 nt, artificial
  Oligomer
uggaugcuggcaucuuaga

SEQ ID NO: 12826 - RNA, 19 nt, artificial
  Oligomer
cuaugugugugcaugucug

SEQ ID NO: 12827 - RNA, 19 nt, artificial
  Oligomer
uugaugggugguacaacaa

SEQ ID NO: 12828 - RNA, 19 nt, artificial
  Oligomer
acuuccagaagguucugaa

SEQ ID NO: 12829 - RNA, 19 nt, artificial
  Oligomer
cucuauguccugcucauca

SEQ ID NO: 12830 - RNA, 19 nt, artificial
  Oligomer
cugcgagaaaccuuccuca

SEQ ID NO: 12831 - RNA, 19 nt, artificial
  Oligomer
caccgagagaaguuccaac

SEQ ID NO: 12832 - RNA, 19 nt, artificial
  Oligomer
uccugguggucuucaugaa

SEQ ID NO: 12833 - RNA, 19 nt, artificial
  Oligomer
acauccugguggucuucau

SEQ ID NO: 12834 - RNA, 19 nt, artificial
  Oligomer
ugcuggucgcuguuaucaa

SEQ ID NO: 12835 - RNA, 19 nt, artificial
  Oligomer
gaagaugugcgggauuucu

SEQ ID NO: 12836 - RNA, 19 nt, artificial
  Oligomer
cuaacaccacaacuaauuu

SEQ ID NO: 12837 - RNA, 19 nt, artificial
  Oligomer
agacaagcugaccugacaa

SEQ ID NO: 12838 - RNA, 19 nt, artificial
  Oligomer
aggagaaugaccaccagga

SEQ ID NO: 12839 - RNA, 19 nt, artificial
  Oligomer
aguuugaguggcuggcuga

SEQ ID NO: 12840 - RNA, 19 nt, artificial
  Oligomer
uccuggucccagcaaucau

SEQ ID NO: 12841 - RNA, 19 nt, artificial
  Oligomer
uggugaauguguaccuguu

SEQ ID NO: 12842 - RNA, 19 nt, artificial
  Oligomer
aggacaaggaggaacugac

SEQ ID NO: 12843 - RNA, 19 nt, artificial
  Oligomer
ugcugagauccuucaucga

SEQ ID NO: 12844 - RNA, 19 nt, artificial
  Oligomer
cuuuggaauggcaaggcca

SEQ ID NO: 12845 - RNA, 19 nt, artificial
  Oligomer
gagcaucgugucugagaag

SEQ ID NO: 12846 - RNA, 19 nt, artificial
  Oligomer
cagagcaucgugucugaga

SEQ ID NO: 12847 - RNA, 19 nt, artificial
  Oligomer
cuccaagaaggagauugaa

SEQ ID NO: 12848 - RNA, 19 nt, artificial
  Oligomer
agaugugcgggauuucugg

SEQ ID NO: 12849 - RNA, 19 nt, artificial
  Oligomer
aucagacccuggcccaaua

SEQ ID NO: 12850 - RNA, 19 nt, artificial
  Oligomer
gcaugucuguauguguguu

SEQ ID NO: 12851 - RNA, 19 nt, artificial
  Oligomer
agcuggcugagaaguucga

SEQ ID NO: 12852 - RNA, 19 nt, artificial
  Oligomer
agguggaggagaaugacca

SEQ ID NO: 12853 - RNA, 19 nt, artificial
  Oligomer
cuuacacagugugggccau

SEQ ID NO: 12854 - RNA, 19 nt, artificial
  Oligomer
uggaggugccugaagucau

SEQ ID NO: 12855 - RNA, 19 nt, artificial
  Oligomer
gaauggccucauuuccaag

SEQ ID NO: 12856 - RNA, 19 nt, artificial
  Oligomer
ccuuauguuccgcauguac

SEQ ID NO: 12857 - RNA, 19 nt, artificial
  Oligomer
caugaaaggcucuccugag

SEQ ID NO: 12858 - RNA, 19 nt, artificial
  Oligomer
uugucuggcauaaaggaga

SEQ ID NO: 12859 - RNA, 19 nt, artificial
  Oligomer
gaaguuuucccgcacagac

SEQ ID NO: 12860 - RNA, 19 nt, artificial
  Oligomer
uauacaggauaccggccau

SEQ ID NO: 12861 - RNA, 19 nt, artificial
  Oligomer
ugcagaaaacacucccgga

SEQ ID NO: 12862 - RNA, 19 nt, artificial
  Oligomer
ugugcaugucuguaugugu

SEQ ID NO: 12863 - RNA, 19 nt, artificial
  Oligomer
guacuaugugugugcaugu

SEQ ID NO: 12864 - RNA, 19 nt, artificial
  Oligomer
ucuagggacuagagugaga

SEQ ID NO: 12865 - RNA, 19 nt, artificial
  Oligomer
aguggcuggcugacaucau

SEQ ID NO: 12866 - RNA, 19 nt, artificial
  Oligomer
cagggcuuugaguacaagu

SEQ ID NO: 12867 - RNA, 19 nt, artificial
  Oligomer
uacuggugguucuuccaga

SEQ ID NO: 12868 - RNA, 19 nt, artificial
  Oligomer
cucucuggcugacaaggau

SEQ ID NO: 12869 - RNA, 19 nt, artificial
  Oligomer
gagcaaugacacuguacug

SEQ ID NO: 12870 - RNA, 19 nt, artificial
  Oligomer
guugaagaugugcgggauu

SEQ ID NO: 12871 - RNA, 19 nt, artificial
  Oligomer
uaugguuccucgcauuccu

SEQ ID NO: 12872 - RNA, 19 nt, artificial
  Oligomer
uuuuaagcacguucuuuca

SEQ ID NO: 12873 - RNA, 19 nt, artificial
  Oligomer
ugugucucagccuggagaa

SEQ ID NO: 12874 - RNA, 19 nt, artificial
  Oligomer
cuggcaugaccaagaaugu

SEQ ID NO: 12875 - RNA, 19 nt, artificial
  Oligomer
aaagcuguaccuugaugga

SEQ ID NO: 12876 - RNA, 19 nt, artificial
  Oligomer
aguucaucaggaugcugag

SEQ ID NO: 12877 - RNA, 19 nt, artificial
  Oligomer
ugaugagagcagcugugac

SEQ ID NO: 12878 - RNA, 19 nt, artificial
  Oligomer
cugaugagagcagcuguga

SEQ ID NO: 12879 - RNA, 19 nt, artificial
  Oligomer
auuugugcggcuacgggau

SEQ ID NO: 12880 - RNA, 19 nt, artificial
  Oligomer
ucccauaccuccuccucuu

SEQ ID NO: 12881 - RNA, 19 nt, artificial
  Oligomer
acuucagaaacaaaucuca

SEQ ID NO: 12882 - RNA, 19 nt, artificial
  Oligomer
ugucuagggacuagaguga

SEQ ID NO: 12883 - RNA, 19 nt, artificial
  Oligomer
uguuccagguggccauagu

SEQ ID NO: 12884 - RNA, 19 nt, artificial
  Oligomer
guucuuccagaccguacca

SEQ ID NO: 12885 - RNA, 19 nt, artificial
  Oligomer
gaugggaauggccucauuu

SEQ ID NO: 12886 - RNA, 19 nt, artificial
  Oligomer
uuauguuccgcauguacga

SEQ ID NO: 12887 - RNA, 19 nt, artificial
  Oligomer
gagaguuccuggacauccu

SEQ ID NO: 12888 - RNA, 19 nt, artificial
  Oligomer
cuccggaugagaaauuuca

SEQ ID NO: 12889 - RNA, 19 nt, artificial
  Oligomer
agggcaguggauuuggcuu

SEQ ID NO: 12890 - RNA, 19 nt, artificial
  Oligomer
uccaguagucucccuucca

SEQ ID NO: 12891 - RNA, 19 nt, artificial
  Oligomer
acccuggcccaauaccuau

SEQ ID NO: 12892 - RNA, 19 nt, artificial
  Oligomer
auuucacccaagguuuuaa

SEQ ID NO: 12893 - RNA, 19 nt, artificial
  Oligomer
caccacaacuaauuucacc

SEQ ID NO: 12894 - RNA, 19 nt, artificial
  Oligomer
gacccauggcaagccauuu

SEQ ID NO: 12895 - RNA, 19 nt, artificial
  Oligomer
uggcaaaugccuugcagga

SEQ ID NO: 12896 - RNA, 19 nt, artificial
  Oligomer
uguggaaaaggccugucag

SEQ ID NO: 12897 - RNA, 19 nt, artificial
  Oligomer
gaauguggaaaaggccugu

SEQ ID NO: 12898 - RNA, 19 nt, artificial
  Oligomer
cacuaugcuguacaucugu

SEQ ID NO: 12899 - RNA, 19 nt, artificial
  Oligomer
gagaaguucgaccucagga

SEQ ID NO: 12900 - RNA, 19 nt, artificial
  Oligomer
uugaguggcuggcugacau

SEQ ID NO: 12901 - RNA, 19 nt, artificial
  Oligomer
gacggugcaacaguucaag

SEQ ID NO: 12902 - RNA, 19 nt, artificial
  Oligomer
cauuccagcccuugcuguu

SEQ ID NO: 12903 - RNA, 19 nt, artificial
  Oligomer
cagcgacauugagacugag

SEQ ID NO: 12904 - RNA, 19 nt, artificial
  Oligomer
gauuccaggacaaggagga

SEQ ID NO: 12905 - RNA, 19 nt, artificial
  Oligomer
aggugguggaguccauguu

SEQ ID NO: 12906 - RNA, 19 nt, artificial
  Oligomer
aaaagucucgccuuauguu

SEQ ID NO: 12907 - RNA, 19 nt, artificial
  Oligomer
ggugcugcuguuuaacuug

SEQ ID NO: 12908 - RNA, 19 nt, artificial
  Oligomer
ugaagauguggaugcacug

SEQ ID NO: 12909 - RNA, 19 nt, artificial
  Oligomer
gucugcaacagcuacugga

SEQ ID NO: 12910 - RNA, 19 nt, artificial
  Oligomer
uggcuaucacgugcuuuca

SEQ ID NO: 12911 - RNA, 19 nt, artificial
  Oligomer
cugagaaaccgcacagugu

SEQ ID NO: 12912 - RNA, 19 nt, artificial
  Oligomer
gcauggaugcuggcaucuu

SEQ ID NO: 12913 - RNA, 19 nt, artificial
  Oligomer
cugaccugacaaguacuau

SEQ ID NO: 12914 - RNA, 19 nt, artificial
  Oligomer
ucugcuuccagacuucaga

SEQ ID NO: 12915 - RNA, 19 nt, artificial
  Oligomer
ccucugcuuccagacuuca

SEQ ID NO: 12916 - RNA, 19 nt, artificial
  Oligomer
ucugauuucccaccuccca

SEQ ID NO: 12917 - RNA, 19 nt, artificial
  Oligomer
ugaugggugguacaacaac

SEQ ID NO: 12918 - RNA, 19 nt, artificial
  Oligomer
aaaaggccugucagcucau

SEQ ID NO: 12919 - RNA, 19 nt, artificial
  Oligomer
uguaugucuuugccuccca

SEQ ID NO: 12920 - RNA, 19 nt, artificial
  Oligomer
acaugggaagauuuucacu

SEQ ID NO: 12921 - RNA, 19 nt, artificial
  Oligomer
caaggaugaguucaucagg

SEQ ID NO: 12922 - RNA, 19 nt, artificial
  Oligomer
aaaggcucuccugaggaaa

SEQ ID NO: 12923 - RNA, 19 nt, artificial
  Oligomer
aggacuuauccuggcuaga

SEQ ID NO: 12924 - RNA, 19 nt, artificial
  Oligomer
gccuacaaagugcugaaga

SEQ ID NO: 12925 - RNA, 19 nt, artificial
  Oligomer
agaagacaagcugaccuga

SEQ ID NO: 12926 - RNA, 19 nt, artificial
  Oligomer
accucaggaccacuaugcu

SEQ ID NO: 12927 - RNA, 19 nt, artificial
  Oligomer
cauggacacuucugguugg

SEQ ID NO: 12928 - RNA, 19 nt, artificial
  Oligomer
ucuuccuggucccagcaau

SEQ ID NO: 12929 - RNA, 19 nt, artificial
  Oligomer
aauguguaccuguucucca

SEQ ID NO: 12930 - RNA, 19 nt, artificial
  Oligomer
guccucacagucuuacaca

SEQ ID NO: 12931 - RNA, 19 nt, artificial
  Oligomer
gagaaguuccaacgcagcu

SEQ ID NO: 12932 - RNA, 19 nt, artificial
  Oligomer
ugaguugacaccucagaga

SEQ ID NO: 12933 - RNA, 19 nt, artificial
  Oligomer
acugacaugggaagauuuu

SEQ ID NO: 12934 - RNA, 19 nt, artificial
  Oligomer
aggaacugacaugggaaga

SEQ ID NO: 12935 - RNA, 19 nt, artificial
  Oligomer
aggugcuggacaucaacca

SEQ ID NO: 12936 - RNA, 19 nt, artificial
  Oligomer
uuuugagggcaguggauuu

SEQ ID NO: 12937 - RNA, 19 nt, artificial
  Oligomer
aaugggcuguucuccaaga

SEQ ID NO: 12938 - RNA, 19 nt, artificial
  Oligomer
cccagucuaacaccacaac

SEQ ID NO: 12939 - RNA, 19 nt, artificial
  Oligomer
caaagugaaaccucugcuu

SEQ ID NO: 12940 - RNA, 19 nt, artificial
  Oligomer
uagggacuagagugagaag

SEQ ID NO: 12941 - RNA, 19 nt, artificial
  Oligomer
acaccucaccucuguucuu

SEQ ID NO: 12942 - RNA, 19 nt, artificial
  Oligomer
aguugagcagagguuugag

SEQ ID NO: 12943 - RNA, 19 nt, artificial
  Oligomer
cagcgauuugauggguggu

SEQ ID NO: 12944 - RNA, 19 nt, artificial
  Oligomer
gaggugcagcgauuugaug

SEQ ID NO: 12945 - RNA, 19 nt, artificial
  Oligomer
cugccaaguguucuguaag

SEQ ID NO: 12946 - RNA, 19 nt, artificial
  Oligomer
aggugucaguguuaguggg

SEQ ID NO: 12947 - RNA, 19 nt, artificial
  Oligomer
auaaguuugaggugucagu

SEQ ID NO: 12948 - RNA, 19 nt, artificial
  Oligomer
cuugauggaccauuuggag

SEQ ID NO: 12949 - RNA, 19 nt, artificial
  Oligomer
augucuuugccucccacca

SEQ ID NO: 12950 - RNA, 19 nt, artificial
  Oligomer
ccuuccugcgagaaaccuu

SEQ ID NO: 12951 - RNA, 19 nt, artificial
  Oligomer
gaguucaucaggaugcuga

SEQ ID NO: 12952 - RNA, 19 nt, artificial
  Oligomer
ugaaaggcucuccugagga

SEQ ID NO: 12953 - RNA, 19 nt, artificial
  Oligomer
gauggcaauggcuaccugu

SEQ ID NO: 12954 - RNA, 19 nt, artificial
  Oligomer
uguucgugacuauuuugag

SEQ ID NO: 12955 - RNA, 19 nt, artificial
  Oligomer
gauaccggccauuucugga

SEQ ID NO: 12956 - RNA, 19 nt, artificial
  Oligomer
gaguuccucaacauucgca

SEQ ID NO: 12957 - RNA, 19 nt, artificial
  Oligomer
gugugugcaugucuguaug

SEQ ID NO: 12958 - RNA, 19 nt, artificial
  Oligomer
aaguacuaugugugugcau

SEQ ID NO: 12959 - RNA, 19 nt, artificial
  Oligomer
uguccugcucaucauccau

SEQ ID NO: 12960 - RNA, 19 nt, artificial
  Oligomer
ugcucuauguccugcucau

SEQ ID NO: 12961 - RNA, 19 nt, artificial
  Oligomer
ccucacagucuuacacagu

SEQ ID NO: 12962 - RNA, 19 nt, artificial
  Oligomer
gaaaccuuccucaaccgcu

SEQ ID NO: 12963 - RNA, 19 nt, artificial
  Oligomer
agcugaugagagcagcugu

SEQ ID NO: 12964 - RNA, 19 nt, artificial
  Oligomer
uccgaaauaccacccugca

SEQ ID NO: 12965 - RNA, 19 nt, artificial
  Oligomer
uguguugguugaagaugug

SEQ ID NO: 12966 - RNA, 19 nt, artificial
  Oligomer
caagccuacaaagugcuga

SEQ ID NO: 12967 - RNA, 19 nt, artificial
  Oligomer
acaggauaccggccauuuc

SEQ ID NO: 12968 - RNA, 19 nt, artificial
  Oligomer
cuaucacgugcuuucagac

SEQ ID NO: 12969 - RNA, 19 nt, artificial
  Oligomer
gggcaaagugaaaccucug

SEQ ID NO: 12970 - RNA, 19 nt, artificial
  Oligomer
gcagugucuagggacuaga

SEQ ID NO: 12971 - RNA, 19 nt, artificial
  Oligomer
cucaccucuguucuuccua

SEQ ID NO: 12972 - RNA, 19 nt, artificial
  Oligomer
uucugaaccggagucuauu

SEQ ID NO: 12973 - RNA, 19 nt, artificial
  Oligomer
caggaguggcauaaguuug

SEQ ID NO: 12974 - RNA, 19 nt, artificial
  Oligomer
uuauuuucaucaugggcuu

SEQ ID NO: 12975 - RNA, 19 nt, artificial
  Oligomer
auguccugcucaucaucca

SEQ ID NO: 12976 - RNA, 19 nt, artificial
  Oligomer
caucaccuuccugcgagaa

SEQ ID NO: 12977 - RNA, 19 nt, artificial
  Oligomer
aguugacaccucagagacu

SEQ ID NO: 12978 - RNA, 19 nt, artificial
  Oligomer
gacugaguugacaccucag

SEQ ID NO: 12979 - RNA, 19 nt, artificial
  Oligomer
ggaugaguucaucaggaug

SEQ ID NO: 12980 - RNA, 19 nt, artificial
  Oligomer
ggucuucaugaaaggcucu

SEQ ID NO: 12981 - RNA, 19 nt, artificial
  Oligomer
uggagaccuuuuucaggca

SEQ ID NO: 12982 - RNA, 19 nt, artificial
  Oligomer
ugaagaaauccgaaauacc

SEQ ID NO: 12983 - RNA, 19 nt, artificial
  Oligomer
acgugcuuucagaccuggu

SEQ ID NO: 12984 - RNA, 19 nt, artificial
  Oligomer
aggaccaggaugugucuca

SEQ ID NO: 12985 - RNA, 19 nt, artificial
  Oligomer
ccucaccucuguucuuccu

SEQ ID NO: 12986 - RNA, 19 nt, artificial
  Oligomer
aaggccugucagcucauca

SEQ ID NO: 12987 - RNA, 19 nt, artificial
  Oligomer
gagucuauucacaggccug

SEQ ID NO: 12988 - RNA, 19 nt, artificial
  Oligomer
agaagguggagaucagcgu

SEQ ID NO: 12989 - RNA, 19 nt, artificial
  Oligomer
caggacaaggaggaacuga

SEQ ID NO: 12990 - RNA, 19 nt, artificial
  Oligomer
auuccaggacaaggaggaa

SEQ ID NO: 12991 - RNA, 19 nt, artificial
  Oligomer
guucgugacuauuuugagg

SEQ ID NO: 12992 - RNA, 19 nt, artificial
  Oligomer
ucugcagcccaaugucuuu

SEQ ID NO: 12993 - RNA, 19 nt, artificial
  Oligomer
cucugcagcccaaugucuu

SEQ ID NO: 12994 - RNA, 19 nt, artificial
  Oligomer
auguguugguugaagaugu

SEQ ID NO: 12995 - RNA, 19 nt, artificial
  Oligomer
ucuucuuuggcuaucacgu

SEQ ID NO: 12996 - RNA, 19 nt, artificial
  Oligomer
uguaugcaaugcuccucag

SEQ ID NO: 12997 - RNA, 19 nt, artificial
  Oligomer
auguaugcaaugcuccuca

SEQ ID NO: 12998 - RNA, 19 nt, artificial
  Oligomer
cauaccuccuccucuucug

SEQ ID NO: 12999 - RNA, 19 nt, artificial
  Oligomer
ugaccugacaaguacuaug

SEQ ID NO: 13000 - RNA, 19 nt, artificial
  Oligomer
gacuagagugagaaguagg

SEQ ID NO: 13001 - RNA, 19 nt, artificial
  Oligomer
accucccaaccuuguucca

SEQ ID NO: 13002 - RNA, 19 nt, artificial
  Oligomer
cauuaugagaacuucuagg

SEQ ID NO: 13003 - RNA, 19 nt, artificial
  Oligomer
agcucaucaacaggcagga

SEQ ID NO: 13004 - RNA, 19 nt, artificial
  Oligomer
auguggaaaaggccuguca

SEQ ID NO: 13005 - RNA, 19 nt, artificial
  Oligomer
agagguggaggagaaugac

SEQ ID NO: 13006 - RNA, 19 nt, artificial
  Oligomer
uugaggugucaguguuagu

SEQ ID NO: 13007 - RNA, 19 nt, artificial
  Oligomer
caucuucuuccugguccca

SEQ ID NO: 13008 - RNA, 19 nt, artificial
  Oligomer
cauccugcucuauguccug

SEQ ID NO: 13009 - RNA, 19 nt, artificial
  Oligomer
caguucaagcgcuucauug

SEQ ID NO: 13010 - RNA, 19 nt, artificial
  Oligomer
cagccaggauaugaucugu

SEQ ID NO: 13011 - RNA, 19 nt, artificial
  Oligomer
ggugccugaagucaucaag

SEQ ID NO: 13012 - RNA, 19 nt, artificial
  Oligomer
aauagcgagcuccgcuuca

SEQ ID NO: 13013 - RNA, 19 nt, artificial
  Oligomer
uucacuucaugcugcggga

SEQ ID NO: 13014 - RNA, 19 nt, artificial
  Oligomer
ugguggucuucaugaaagg

SEQ ID NO: 13015 - RNA, 19 nt, artificial
  Oligomer
aagaaauccgaaauaccac

SEQ ID NO: 13016 - RNA, 19 nt, artificial
  Oligomer
guugguugaagaugugcgg

SEQ ID NO: 13017 - RNA, 19 nt, artificial
  Oligomer
aaagugcugaagaugugga

SEQ ID NO: 13018 - RNA, 19 nt, artificial
  Oligomer
ccauaccuccuccucuucu

SEQ ID NO: 13019 - RNA, 19 nt, artificial
  Oligomer
ggugaguguaaggaugcag

SEQ ID NO: 13020 - RNA, 19 nt, artificial
  Oligomer
gugcaugucuguaugugug

SEQ ID NO: 13021 - RNA, 19 nt, artificial
  Oligomer
aucucagaagacaagcuga

SEQ ID NO: 13022 - RNA, 19 nt, artificial
  Oligomer
agugaaaccucugcuucca

SEQ ID NO: 13023 - RNA, 19 nt, artificial
  Oligomer
acuucucccaccauuauga

SEQ ID NO: 13024 - RNA, 19 nt, artificial
  Oligomer
cugagaaguucgaccucag

SEQ ID NO: 13025 - RNA, 19 nt, artificial
  Oligomer
gugucaguguuagugggag

SEQ ID NO: 13026 - RNA, 19 nt, artificial
  Oligomer
uugaguacaagucagggca

SEQ ID NO: 13027 - RNA, 19 nt, artificial
  Oligomer
ucuccuacaucuugcucac

SEQ ID NO: 13028 - RNA, 19 nt, artificial
  Oligomer
ggcucuccugaggaaaagu

SEQ ID NO: 13029 - RNA, 19 nt, artificial
  Oligomer
agaccuuuuucaggcaccu

SEQ ID NO: 13030 - RNA, 19 nt, artificial
  Oligomer
aguaugaccuggugcugcu

SEQ ID NO: 13031 - RNA, 19 nt, artificial
  Oligomer
cacucugcugcucaagauc

SEQ ID NO: 13032 - RNA, 19 nt, artificial
  Oligomer
ucuccaagaaggagauuga

SEQ ID NO: 13033 - RNA, 19 nt, artificial
  Oligomer
gaaugggcuguucuccaag

SEQ ID NO: 13034 - RNA, 19 nt, artificial
  Oligomer
aggaaugggcuguucucca

SEQ ID NO: 13035 - RNA, 19 nt, artificial
  Oligomer
uauccuggcuagagcugcu

SEQ ID NO: 13036 - RNA, 19 nt, artificial
  Oligomer
cugaagauguggaugcacu

SEQ ID NO: 13037 - RNA, 19 nt, artificial
  Oligomer
agaccuuagcaacaccauc

SEQ ID NO: 13038 - RNA, 19 nt, artificial
  Oligomer
uacagaaacccacucggca

SEQ ID NO: 13039 - RNA, 19 nt, artificial
  Oligomer
agugucuagggacuagagu

SEQ ID NO: 13040 - RNA, 19 nt, artificial
  Oligomer
ucuucaacucccugcagga

SEQ ID NO: 13041 - RNA, 19 nt, artificial
  Oligomer
aaguuugaggugucagugu

SEQ ID NO: 13042 - RNA, 19 nt, artificial
  Oligomer
cuauguccugcucaucauc

SEQ ID NO: 13043 - RNA, 19 nt, artificial
  Oligomer
gugguucuuccagaccgua

SEQ ID NO: 13044 - RNA, 19 nt, artificial
  Oligomer
guggugaauguguaccugu

SEQ ID NO: 13045 - RNA, 19 nt, artificial
  Oligomer
ucuuacacagugugggcca

SEQ ID NO: 13046 - RNA, 19 nt, artificial
  Oligomer
ccuggugcugcuguuuaac

SEQ ID NO: 13047 - RNA, 19 nt, artificial
  Oligomer
gucaacuucguccugucca

SEQ ID NO: 13048 - RNA, 19 nt, artificial
  Oligomer
aauggcaaggccacaagga

SEQ ID NO: 13049 - RNA, 19 nt, artificial
  Oligomer
uguugcuucccuuugguga

SEQ ID NO: 13050 - RNA, 19 nt, artificial
  Oligomer
caaaugccuugcaggaggu

SEQ ID NO: 13051 - RNA, 19 nt, artificial
  Oligomer
ugaguguaaggaugcagug

SEQ ID NO: 13052 - RNA, 19 nt, artificial
  Oligomer
ugaaaccucugcuuccaga

SEQ ID NO: 13053 - RNA, 19 nt, artificial
  Oligomer
uggaggagaaugaccacca

SEQ ID NO: 13054 - RNA, 19 nt, artificial
  Oligomer
cucuagcauggacacuucu

SEQ ID NO: 13055 - RNA, 19 nt, artificial
  Oligomer
uugugcugcuccugauccu

SEQ ID NO: 13056 - RNA, 19 nt, artificial
  Oligomer
agagaaguuccaacgcagc

SEQ ID NO: 13057 - RNA, 19 nt, artificial
  Oligomer
aagguaacgucauuccagc

SEQ ID NO: 13058 - RNA, 19 nt, artificial
  Oligomer
acugaguugacaccucaga

SEQ ID NO: 13059 - RNA, 19 nt, artificial
  Oligomer
uuuccaaggaugaguucau

SEQ ID NO: 13060 - RNA, 19 nt, artificial
  Oligomer
gacaaggauggcaauggcu

SEQ ID NO: 13061 - RNA, 19 nt, artificial
  Oligomer
cuggugcugcuguuuaacu

SEQ ID NO: 13062 - RNA, 19 nt, artificial
  Oligomer
uggugaccgcuacugguuu

SEQ ID NO: 13063 - RNA, 19 nt, artificial
  Oligomer
uugaacaauuugugcggcu

SEQ ID NO: 13064 - RNA, 19 nt, artificial
  Oligomer
acugggcuugucucccauu

SEQ ID NO: 13065 - RNA, 19 nt, artificial
  Oligomer
caaagugcugaagaugugg

SEQ ID NO: 13066 - RNA, 19 nt, artificial
  Oligomer
agaaaugccagcugccacu

SEQ ID NO: 13067 - RNA, 19 nt, artificial
  Oligomer
ugagaaaugccagcugcca

SEQ ID NO: 13068 - RNA, 19 nt, artificial
  Oligomer
ccagucuaacaccacaacu

SEQ ID NO: 13069 - RNA, 19 nt, artificial
  Oligomer
aaaugccuugcaggaggua

SEQ ID NO: 13070 - RNA, 19 nt, artificial
  Oligomer
cagugucuagggacuagag

SEQ ID NO: 13071 - RNA, 19 nt, artificial
  Oligomer
cucagccuggagaaauggu

SEQ ID NO: 13072 - RNA, 19 nt, artificial
  Oligomer
uuuugccuccauccucaaa

SEQ ID NO: 13073 - RNA, 19 nt, artificial
  Oligomer
ugaguacaagucagggcag

SEQ ID NO: 13074 - RNA, 19 nt, artificial
  Oligomer
cuuuccuggccucuuccau

SEQ ID NO: 13075 - RNA, 19 nt, artificial
  Oligomer
uguucuccuacaucuugcu

SEQ ID NO: 13076 - RNA, 19 nt, artificial
  Oligomer
cugaguugacaccucagag

SEQ ID NO: 13077 - RNA, 19 nt, artificial
  Oligomer
agcgacauugagacugagu

SEQ ID NO: 13078 - RNA, 19 nt, artificial
  Oligomer
augaucugucccucuccca

SEQ ID NO: 13079 - RNA, 19 nt, artificial
  Oligomer
cugaagucaucaaggaccu

SEQ ID NO: 13080 - RNA, 19 nt, artificial
  Oligomer
gccugaagucaucaaggac

SEQ ID NO: 13081 - RNA, 19 nt, artificial
  Oligomer
caaggaggaacugacaugg

SEQ ID NO: 13082 - RNA, 19 nt, artificial
  Oligomer
gcugagauccuucaucgag

SEQ ID NO: 13083 - RNA, 19 nt, artificial
  Oligomer
guuuaacuuggaggaagag

SEQ ID NO: 13084 - RNA, 19 nt, artificial
  Oligomer
gaugagaaauuucaagagg

SEQ ID NO: 13085 - RNA, 19 nt, artificial
  Oligomer
ucuguuguucgugacuauu

SEQ ID NO: 13086 - RNA, 19 nt, artificial
  Oligomer
augggcuguucuccaagaa

SEQ ID NO: 13087 - RNA, 19 nt, artificial
  Oligomer
uguucagcaccaucguccu

SEQ ID NO: 13088 - RNA, 19 nt, artificial
  Oligomer
uguacaaccaggacuuauc

SEQ ID NO: 13089 - RNA, 19 nt, artificial
  Oligomer
cagcuuccugcagaaaaca

SEQ ID NO: 13090 - RNA, 19 nt, artificial
  Oligomer
ggcuaucacgugcuuucag

SEQ ID NO: 13091 - RNA, 19 nt, artificial
  Oligomer
aauuucacccaagguuuua

SEQ ID NO: 13092 - RNA, 19 nt, artificial
  Oligomer
auggaugcuggcaucuuag

SEQ ID NO: 13093 - RNA, 19 nt, artificial
  Oligomer
gugucuagggacuagagug

SEQ ID NO: 13094 - RNA, 19 nt, artificial
  Oligomer
cacaccucaccucuguucu

SEQ ID NO: 13095 - RNA, 19 nt, artificial
  Oligomer
cacuucucccaccauuaug

SEQ ID NO: 13096 - RNA, 19 nt, artificial
  Oligomer
gcugagaaguucgaccuca

SEQ ID NO: 13097 - RNA, 19 nt, artificial
  Oligomer
ggucuucaagucauccguc

SEQ ID NO: 13098 - RNA, 19 nt, artificial
  Oligomer
caaagaccuggucuucaag

SEQ ID NO: 13099 - RNA, 19 nt, artificial
  Oligomer
gaguggcauaaguuugagg

SEQ ID NO: 13100 - RNA, 19 nt, artificial
  Oligomer
aguauuacuggugguucuu

SEQ ID NO: 13101 - RNA, 19 nt, artificial
  Oligomer
gcuucauugagaacuaccg

SEQ ID NO: 13102 - RNA, 19 nt, artificial
  Oligomer
ugacaccucagagacugca

SEQ ID NO: 13103 - RNA, 19 nt, artificial
  Oligomer
augcugcgggaccacaaua

SEQ ID NO: 13104 - RNA, 19 nt, artificial
  Oligomer
guuccgcauguacgacuuu

SEQ ID NO: 13105 - RNA, 19 nt, artificial
  Oligomer
caccuccuggagaccuuuu

SEQ ID NO: 13106 - RNA, 19 nt, artificial
  Oligomer
aaugucuuugucuggcaua

SEQ ID NO: 13107 - RNA, 19 nt, artificial
  Oligomer
uacaaagugcugaagaugu

SEQ ID NO: 13108 - RNA, 19 nt, artificial
  Oligomer
uuucagaccuggugagcgu

SEQ ID NO: 13109 - RNA, 19 nt, artificial
  Oligomer
aagguuuuaagcacguucu

SEQ ID NO: 13110 - RNA, 19 nt, artificial
  Oligomer
augugugugcaugucugua

SEQ ID NO: 13111 - RNA, 19 nt, artificial
  Oligomer
augugucucagccuggaga

SEQ ID NO: 13112 - RNA, 19 nt, artificial
  Oligomer
ugucugugcacaucuacau

SEQ ID NO: 13113 - RNA, 19 nt, artificial
  Oligomer
cugacaucauccgagaggu

SEQ ID NO: 13114 - RNA, 19 nt, artificial
  Oligomer
ccucagggagaucuacuca

SEQ ID NO: 13115 - RNA, 19 nt, artificial
  Oligomer
ccugcucaucauccauggu

SEQ ID NO: 13116 - RNA, 19 nt, artificial
  Oligomer
ucuuugccucccaccacuu

SEQ ID NO: 13117 - RNA, 19 nt, artificial
  Oligomer
cucucuugccucuuuccug

SEQ ID NO: 13118 - RNA, 19 nt, artificial
  Oligomer
ccucucuugccucuuuccu

SEQ ID NO: 13119 - RNA, 19 nt, artificial
  Oligomer
acauugagacugaguugac

SEQ ID NO: 13120 - RNA, 19 nt, artificial
  Oligomer
augaccuggugcugcuguu

SEQ ID NO: 13121 - RNA, 19 nt, artificial
  Oligomer
aacuucguccuguccagca

SEQ ID NO: 13122 - RNA, 19 nt, artificial
  Oligomer
agauccgugugguagaugg

SEQ ID NO: 13123 - RNA, 19 nt, artificial
  Oligomer
acaucaacccugcacucuc

SEQ ID NO: 13124 - RNA, 19 nt, artificial
  Oligomer
caccuaccagaacaucgcu

SEQ ID NO: 13125 - RNA, 19 nt, artificial
  Oligomer
aaugcuccucagcccucuu

SEQ ID NO: 13126 - RNA, 19 nt, artificial
  Oligomer
uucagaaacaaaucucaga

SEQ ID NO: 13127 - RNA, 19 nt, artificial
  Oligomer
ugucucagccuggagaaau

SEQ ID NO: 13128 - RNA, 19 nt, artificial
  Oligomer
gaugggugguacaacaacc

SEQ ID NO: 13129 - RNA, 19 nt, artificial
  Oligomer
ggugucugugcacaucuac

SEQ ID NO: 13130 - RNA, 19 nt, artificial
  Oligomer
ucuucaagucauccgucag

SEQ ID NO: 13131 - RNA, 19 nt, artificial
  Oligomer
guggcauaaguuugaggug

SEQ ID NO: 13132 - RNA, 19 nt, artificial
  Oligomer
gauggaccauuuggagagg

SEQ ID NO: 13133 - RNA, 19 nt, artificial
  Oligomer
gaggugccugaagucauca

SEQ ID NO: 13134 - RNA, 19 nt, artificial
  Oligomer
cugacaugggaagauuuuc

SEQ ID NO: 13135 - RNA, 19 nt, artificial
  Oligomer
ugacaaggauggcaauggc

SEQ ID NO: 13136 - RNA, 19 nt, artificial
  Oligomer
ccuggagaccuuuuucagg

SEQ ID NO: 13137 - RNA, 19 nt, artificial
  Oligomer
uguucuccaagaaggagau

SEQ ID NO: 13138 - RNA, 19 nt, artificial
  Oligomer
aucguccuugaacaauuug

SEQ ID NO: 13139 - RNA, 19 nt, artificial
  Oligomer
cacugaaguuuucccgcac

SEQ ID NO: 13140 - RNA, 19 nt, artificial
  Oligomer
ugaagaugugcgggauuuc

SEQ ID NO: 13141 - RNA, 19 nt, artificial
  Oligomer
aaaacacucccggaguaua

SEQ ID NO: 13142 - RNA, 19 nt, artificial
  Oligomer
auggcaagccauuuacaga

SEQ ID NO: 13143 - RNA, 19 nt, artificial
  Oligomer
ugcaugucuguaugugugu

SEQ ID NO: 13144 - RNA, 19 nt, artificial
  Oligomer
cagacuucagaaacaaauc

SEQ ID NO: 13145 - RNA, 19 nt, artificial
  Oligomer
ccaagaauguggaaaaggc

SEQ ID NO: 13146 - RNA, 19 nt, artificial
  Oligomer
cuuccagaagguucugaac

SEQ ID NO: 13147 - RNA, 19 nt, artificial
  Oligomer
cuagcauggacacuucugg

SEQ ID NO: 13148 - RNA, 19 nt, artificial
  Oligomer
ugucaguguuagugggagg

SEQ ID NO: 13149 - RNA, 19 nt, artificial
  Oligomer
gaggugucaguguuagugg

SEQ ID NO: 13150 - RNA, 19 nt, artificial
  Oligomer
aguggcauaaguuugaggu

SEQ ID NO: 13151 - RNA, 19 nt, artificial
  Oligomer
gaagaagguggagaucagc

SEQ ID NO: 13152 - RNA, 19 nt, artificial
  Oligomer
cauucuaaucccugagccc

SEQ ID NO: 13153 - RNA, 19 nt, artificial
  Oligomer
aucaccuuccugcgagaaa

SEQ ID NO: 13154 - RNA, 19 nt, artificial
  Oligomer
cuacaucuugcucaccaug

SEQ ID NO: 13155 - RNA, 19 nt, artificial
  Oligomer
cuccuacaucagccaggau

SEQ ID NO: 13156 - RNA, 19 nt, artificial
  Oligomer
caucgagaucuccaacaac

SEQ ID NO: 13157 - RNA, 19 nt, artificial
  Oligomer
augaguucaucaggaugcu

SEQ ID NO: 13158 - RNA, 19 nt, artificial
  Oligomer
cugaggaaaagucucgccu

SEQ ID NO: 13159 - RNA, 19 nt, artificial
  Oligomer
cucuccugaggaaaagucu

SEQ ID NO: 13160 - RNA, 19 nt, artificial
  Oligomer
ugggugaaauuaguugugg

SEQ ID NO: 13161 - RNA, 19 nt, artificial
  Oligomer
uaagaugccagcauccaug

SEQ ID NO: 13162 - RNA, 19 nt, artificial
  Oligomer
uucagugcugagcugucuc

SEQ ID NO: 13163 - RNA, 19 nt, artificial
  Oligomer
uuaguugugguguuagacu

SEQ ID NO: 13164 - RNA, 19 nt, artificial
  Oligomer
acuugaguuccgauugaug

SEQ ID NO: 13165 - RNA, 19 nt, artificial
  Oligomer
ucccacugcauccuuacac

SEQ ID NO: 13166 - RNA, 19 nt, artificial
  Oligomer
ugcauccuuacacucaccg

SEQ ID NO: 13167 - RNA, 19 nt, artificial
  Oligomer
uucaccacgcugaucucca

SEQ ID NO: 13168 - RNA, 19 nt, artificial
  Oligomer
ugucaacucagucucaaug

SEQ ID NO: 13169 - RNA, 19 nt, artificial
  Oligomer
uaagacugugaggacgaug

SEQ ID NO: 13170 - RNA, 19 nt, artificial
  Oligomer
cuugaguuccgauugauga

SEQ ID NO: 13171 - RNA, 19 nt, artificial
  Oligomer
uuuggguaucuggcacauc

SEQ ID NO: 13172 - RNA, 19 nt, artificial
  Oligomer
uccacugcccucaaaauag

SEQ ID NO: 13173 - RNA, 19 nt, artificial
  Oligomer
ugaggcagccagaaauagg

SEQ ID NO: 13174 - RNA, 19 nt, artificial
  Oligomer
uucggauuucuucaaucuc

SEQ ID NO: 13175 - RNA, 19 nt, artificial
  Oligomer
gcacaaauuguucaaggac

SEQ ID NO: 13176 - RNA, 19 nt, artificial
  Oligomer
uugcauacauagguauugg

SEQ ID NO: 13177 - RNA, 19 nt, artificial
  Oligomer
ugugaugcccgugugaugu

SEQ ID NO: 13178 - RNA, 19 nt, artificial
  Oligomer
auuaguugugguguuagac

SEQ ID NO: 13179 - RNA, 19 nt, artificial
  Oligomer
uugggaggugggaaaucag

SEQ ID NO: 13180 - RNA, 19 nt, artificial
  Oligomer
uccacauucuuggucaugc

SEQ ID NO: 13181 - RNA, 19 nt, artificial
  Oligomer
uguaaauggcuugccaugg

SEQ ID NO: 13182 - RNA, 19 nt, artificial
  Oligomer
uggaaugacguuaccuucu

SEQ ID NO: 13183 - RNA, 19 nt, artificial
  Oligomer
ugacguuaccuucuugcca

SEQ ID NO: 13184 - RNA, 19 nt, artificial
  Oligomer
uaccuucuugccaaaccuc

SEQ ID NO: 13185 - RNA, 19 nt, artificial
  Oligomer
uuugacacagagcugcgug

SEQ ID NO: 13186 - RNA, 19 nt, artificial
  Oligomer
uuccacauucuuggucaug

SEQ ID NO: 13187 - RNA, 19 nt, artificial
  Oligomer
ugaacuguugcaccgucug

SEQ ID NO: 13188 - RNA, 19 nt, artificial
  Oligomer
uccuucuuggagaacagcc

SEQ ID NO: 13189 - RNA, 19 nt, artificial
  Oligomer
uugucuucugagauuuguu

SEQ ID NO: 13190 - RNA, 19 nt, artificial
  Oligomer
uuucuccaggcugagacac

SEQ ID NO: 13191 - RNA, 19 nt, artificial
  Oligomer
uuguaccacccaucaaauc

SEQ ID NO: 13192 - RNA, 19 nt, artificial
  Oligomer
uagacuccgguucagaacc

SEQ ID NO: 13193 - RNA, 19 nt, artificial
  Oligomer
uaacacugacaccucaaac

SEQ ID NO: 13194 - RNA, 19 nt, artificial
  Oligomer
auauccuggcugauguagg

SEQ ID NO: 13195 - RNA, 19 nt, artificial
  Oligomer
auuccugguguucucaaac

SEQ ID NO: 13196 - RNA, 19 nt, artificial
  Oligomer
uaugggaguagggaggguu

SEQ ID NO: 13197 - RNA, 19 nt, artificial
  Oligomer
uucuaagaugccagcaucc

SEQ ID NO: 13198 - RNA, 19 nt, artificial
  Oligomer
ucugugcuccaugagguug

SEQ ID NO: 13199 - RNA, 19 nt, artificial
  Oligomer
uguuguaccacccaucaaa

SEQ ID NO: 13200 - RNA, 19 nt, artificial
  Oligomer
aucuucuuacagaacacuu

SEQ ID NO: 13201 - RNA, 19 nt, artificial
  Oligomer
uggguaucuggcacaucug

SEQ ID NO: 13202 - RNA, 19 nt, artificial
  Oligomer
uggaucagggcaaagcuac

SEQ ID NO: 13203 - RNA, 19 nt, artificial
  Oligomer
cuugccauuccaaagcuuc

SEQ ID NO: 13204 - RNA, 19 nt, artificial
  Oligomer
uugaggauggaggcaaaag

SEQ ID NO: 13205 - RNA, 19 nt, artificial
  Oligomer
uuguacucaaagcccuggg

SEQ ID NO: 13206 - RNA, 19 nt, artificial
  Oligomer
uggaaaugaggccauuccc

SEQ ID NO: 13207 - RNA, 19 nt, artificial
  Oligomer
agaaauggccgguauccug

SEQ ID NO: 13208 - RNA, 19 nt, artificial
  Oligomer
ucauacacagcgauguucu

SEQ ID NO: 13209 - RNA, 19 nt, artificial
  Oligomer
auagacuccgguucagaac

SEQ ID NO: 13210 - RNA, 19 nt, artificial
  Oligomer
ucaggagagccuuucauga

SEQ ID NO: 13211 - RNA, 19 nt, artificial
  Oligomer
uccuuuaugccagacaaag

SEQ ID NO: 13212 - RNA, 19 nt, artificial
  Oligomer
ucugugcgggaaaacuuca

SEQ ID NO: 13213 - RNA, 19 nt, artificial
  Oligomer
uugugguagcggaaccaga

SEQ ID NO: 13214 - RNA, 19 nt, artificial
  Oligomer
uaguugugguguuagacug

SEQ ID NO: 13215 - RNA, 19 nt, artificial
  Oligomer
uggguuucuguaaauggcu

SEQ ID NO: 13216 - RNA, 19 nt, artificial
  Oligomer
uccgguucagaaccuucug

SEQ ID NO: 13217 - RNA, 19 nt, artificial
  Oligomer
ucccguagccgcacaaauu

SEQ ID NO: 13218 - RNA, 19 nt, artificial
  Oligomer
gacacuugaguuccgauug

SEQ ID NO: 13219 - RNA, 19 nt, artificial
  Oligomer
aaaaccuugggugaaauua

SEQ ID NO: 13220 - RNA, 19 nt, artificial
  Oligomer
gugaaauuaguuguggugu

SEQ ID NO: 13221 - RNA, 19 nt, artificial
  Oligomer
acuccgguucagaaccuuc

SEQ ID NO: 13222 - RNA, 19 nt, artificial
  Oligomer
ucagggcaaagcuaccaug

SEQ ID NO: 13223 - RNA, 19 nt, artificial
  Oligomer
uaguaguaggcccucucca

SEQ ID NO: 13224 - RNA, 19 nt, artificial
  Oligomer
ucaccaggucugaaagcac

SEQ ID NO: 13225 - RNA, 19 nt, artificial
  Oligomer
auuuggaagggagacuacu

SEQ ID NO: 13226 - RNA, 19 nt, artificial
  Oligomer
ugagaugguguugcuaagg

SEQ ID NO: 13227 - RNA, 19 nt, artificial
  Oligomer
uaguacuugucaggucagc

SEQ ID NO: 13228 - RNA, 19 nt, artificial
  Oligomer
uucugaagucuggaagcag

SEQ ID NO: 13229 - RNA, 19 nt, artificial
  Oligomer
uagaugauugcugggacca

SEQ ID NO: 13230 - RNA, 19 nt, artificial
  Oligomer
cuggaaugacguuaccuuc

SEQ ID NO: 13231 - RNA, 19 nt, artificial
  Oligomer
auccugaugaacucauccu

SEQ ID NO: 13232 - RNA, 19 nt, artificial
  Oligomer
uccugaugaacucauccuu

SEQ ID NO: 13233 - RNA, 19 nt, artificial
  Oligomer
ucagccagagagaacaugg

SEQ ID NO: 13234 - RNA, 19 nt, artificial
  Oligomer
uccugcagggugguauuuc

SEQ ID NO: 13235 - RNA, 19 nt, artificial
  Oligomer
uucugguagguggcgauga

SEQ ID NO: 13236 - RNA, 19 nt, artificial
  Oligomer
aggagcauugcauacauag

SEQ ID NO: 13237 - RNA, 19 nt, artificial
  Oligomer
ugaaauuaguugugguguu

SEQ ID NO: 13238 - RNA, 19 nt, artificial
  Oligomer
uugaagaagggcucaaagg

SEQ ID NO: 13239 - RNA, 19 nt, artificial
  Oligomer
ugccgcucacagauguaca

SEQ ID NO: 13240 - RNA, 19 nt, artificial
  Oligomer
uguagaugugcacagacac

SEQ ID NO: 13241 - RNA, 19 nt, artificial
  Oligomer
augucaguuccuccuuguc

SEQ ID NO: 13242 - RNA, 19 nt, artificial
  Oligomer
uuuuccucaggagagccuu

SEQ ID NO: 13243 - RNA, 19 nt, artificial
  Oligomer
ccgcacaaauuguucaagg

SEQ ID NO: 13244 - RNA, 19 nt, artificial
  Oligomer
acgauggugcugaacagag

SEQ ID NO: 13245 - RNA, 19 nt, artificial
  Oligomer
uggucugugcgggaaaacu

SEQ ID NO: 13246 - RNA, 19 nt, artificial
  Oligomer
auccacaucuucagcacuu

SEQ ID NO: 13247 - RNA, 19 nt, artificial
  Oligomer
uucagcacuuuguaggcuu

SEQ ID NO: 13248 - RNA, 19 nt, artificial
  Oligomer
acugcauccuuacacucac

SEQ ID NO: 13249 - RNA, 19 nt, artificial
  Oligomer
ugcacacacauaguacuug

SEQ ID NO: 13250 - RNA, 19 nt, artificial
  Oligomer
ucccacuaacacugacacc

SEQ ID NO: 13251 - RNA, 19 nt, artificial
  Oligomer
augauggccaggaucagga

SEQ ID NO: 13252 - RNA, 19 nt, artificial
  Oligomer
uguaagacugugaggacga

SEQ ID NO: 13253 - RNA, 19 nt, artificial
  Oligomer
ucagugaacagcaagggcu

SEQ ID NO: 13254 - RNA, 19 nt, artificial
  Oligomer
acauaaggcgagacuuuuc

SEQ ID NO: 13255 - RNA, 19 nt, artificial
  Oligomer
guagccauugccauccuug

SEQ ID NO: 13256 - RNA, 19 nt, artificial
  Oligomer
aaaaggugccugaaaaagg

SEQ ID NO: 13257 - RNA, 19 nt, artificial
  Oligomer
ucuaccuccugcaaggcau

SEQ ID NO: 13258 - RNA, 19 nt, artificial
  Oligomer
uauggccaccuggaacaag

SEQ ID NO: 13259 - RNA, 19 nt, artificial
  Oligomer
uccaccucucggaugaugu

SEQ ID NO: 13260 - RNA, 19 nt, artificial
  Oligomer
ucucggaugaugucagcca

SEQ ID NO: 13261 - RNA, 19 nt, artificial
  Oligomer
acagcuuuggguaucuggc

SEQ ID NO: 13262 - RNA, 19 nt, artificial
  Oligomer
agacccaucaucauggaag

SEQ ID NO: 13263 - RNA, 19 nt, artificial
  Oligomer
ucaaugaagcgcuugaacu

SEQ ID NO: 13264 - RNA, 19 nt, artificial
  Oligomer
uagccauugccauccuugu

SEQ ID NO: 13265 - RNA, 19 nt, artificial
  Oligomer
auccacugcccucaaaaua

SEQ ID NO: 13266 - RNA, 19 nt, artificial
  Oligomer
accuugggugaaauuaguu

SEQ ID NO: 13267 - RNA, 19 nt, artificial
  Oligomer
acacauaguacuugucagg

SEQ ID NO: 13268 - RNA, 19 nt, artificial
  Oligomer
aguacuugucaggucagcu

SEQ ID NO: 13269 - RNA, 19 nt, artificial
  Oligomer
agaaguucucauaauggug

SEQ ID NO: 13270 - RNA, 19 nt, artificial
  Oligomer
auucuuggucaugccaggg

SEQ ID NO: 13271 - RNA, 19 nt, artificial
  Oligomer
uaucuggcacaucugucac

SEQ ID NO: 13272 - RNA, 19 nt, artificial
  Oligomer
uacaugauggccaggauca

SEQ ID NO: 13273 - RNA, 19 nt, artificial
  Oligomer
agaaccaccaguaauacuu

SEQ ID NO: 13274 - RNA, 19 nt, artificial
  Oligomer
ucugugaugcccgugugau

SEQ ID NO: 13275 - RNA, 19 nt, artificial
  Oligomer
ugaggugucaacucagucu

SEQ ID NO: 13276 - RNA, 19 nt, artificial
  Oligomer
aaaucuucccaugucaguu

SEQ ID NO: 13277 - RNA, 19 nt, artificial
  Oligomer
augcgaauguugaggaacu

SEQ ID NO: 13278 - RNA, 19 nt, artificial
  Oligomer
uacuggagcagggagaaga

SEQ ID NO: 13279 - RNA, 19 nt, artificial
  Oligomer
ucuaagaugccagcaucca

SEQ ID NO: 13280 - RNA, 19 nt, artificial
  Oligomer
cagacaugcacacacauag

SEQ ID NO: 13281 - RNA, 19 nt, artificial
  Oligomer
uuguuguaccacccaucaa

SEQ ID NO: 13282 - RNA, 19 nt, artificial
  Oligomer
uucagaaccuucuggaagu

SEQ ID NO: 13283 - RNA, 19 nt, artificial
  Oligomer
ugaugagcaggacauagag

SEQ ID NO: 13284 - RNA, 19 nt, artificial
  Oligomer
ugaggaagguuucucgcag

SEQ ID NO: 13285 - RNA, 19 nt, artificial
  Oligomer
guuggaacuucucucggug

SEQ ID NO: 13286 - RNA, 19 nt, artificial
  Oligomer
uucaugaagaccaccagga

SEQ ID NO: 13287 - RNA, 19 nt, artificial
  Oligomer
augaagaccaccaggaugu

SEQ ID NO: 13288 - RNA, 19 nt, artificial
  Oligomer
uugauaacagcgaccagca

SEQ ID NO: 13289 - RNA, 19 nt, artificial
  Oligomer
agaaaucccgcacaucuuc

SEQ ID NO: 13290 - RNA, 19 nt, artificial
  Oligomer
aaauuaguugugguguuag

SEQ ID NO: 13291 - RNA, 19 nt, artificial
  Oligomer
uugucaggucagcuugucu

SEQ ID NO: 13292 - RNA, 19 nt, artificial
  Oligomer
uccugguggucauucuccu

SEQ ID NO: 13293 - RNA, 19 nt, artificial
  Oligomer
ucagccagccacucaaacu

SEQ ID NO: 13294 - RNA, 19 nt, artificial
  Oligomer
augauugcugggaccagga

SEQ ID NO: 13295 - RNA, 19 nt, artificial
  Oligomer
aacagguacacauucacca

SEQ ID NO: 13296 - RNA, 19 nt, artificial
  Oligomer
gucaguuccuccuuguccu

SEQ ID NO: 13297 - RNA, 19 nt, artificial
  Oligomer
ucgaugaaggaucucagca

SEQ ID NO: 13298 - RNA, 19 nt, artificial
  Oligomer
uggccuugccauuccaaag

SEQ ID NO: 13299 - RNA, 19 nt, artificial
  Oligomer
cuucucagacacgaugcuc

SEQ ID NO: 13300 - RNA, 19 nt, artificial
  Oligomer
ucucagacacgaugcucug

SEQ ID NO: 13301 - RNA, 19 nt, artificial
  Oligomer
uucaaucuccuucuuggag

SEQ ID NO: 13302 - RNA, 19 nt, artificial
  Oligomer
ccagaaaucccgcacaucu

SEQ ID NO: 13303 - RNA, 19 nt, artificial
  Oligomer
uauugggccagggucugau

SEQ ID NO: 13304 - RNA, 19 nt, artificial
  Oligomer
aacacacauacagacaugc

SEQ ID NO: 13305 - RNA, 19 nt, artificial
  Oligomer
ucgaacuucucagccagcu

SEQ ID NO: 13306 - RNA, 19 nt, artificial
  Oligomer
uggucauucuccuccaccu

SEQ ID NO: 13307 - RNA, 19 nt, artificial
  Oligomer
auggcccacacuguguaag

SEQ ID NO: 13308 - RNA, 19 nt, artificial
  Oligomer
augacuucaggcaccucca

SEQ ID NO: 13309 - RNA, 19 nt, artificial
  Oligomer
cuuggaaaugaggccauuc

SEQ ID NO: 13310 - RNA, 19 nt, artificial
  Oligomer
guacaugcggaacauaagg

SEQ ID NO: 13311 - RNA, 19 nt, artificial
  Oligomer
cucaggagagccuuucaug

SEQ ID NO: 13312 - RNA, 19 nt, artificial
  Oligomer
ucuccuuuaugccagacaa

SEQ ID NO: 13313 - RNA, 19 nt, artificial
  Oligomer
gucugugcgggaaaacuuc

SEQ ID NO: 13314 - RNA, 19 nt, artificial
  Oligomer
auggccgguauccuguaua

SEQ ID NO: 13315 - RNA, 19 nt, artificial
  Oligomer
uccgggaguguuuucugca

SEQ ID NO: 13316 - RNA, 19 nt, artificial
  Oligomer
acacauacagacaugcaca

SEQ ID NO: 13317 - RNA, 19 nt, artificial
  Oligomer
acaugcacacacauaguac

SEQ ID NO: 13318 - RNA, 19 nt, artificial
  Oligomer
ucucacucuagucccuaga

SEQ ID NO: 13319 - RNA, 19 nt, artificial
  Oligomer
augaugucagccagccacu

SEQ ID NO: 13320 - RNA, 19 nt, artificial
  Oligomer
acuuguacucaaagcccug

SEQ ID NO: 13321 - RNA, 19 nt, artificial
  Oligomer
ucuggaagaaccaccagua

SEQ ID NO: 13322 - RNA, 19 nt, artificial
  Oligomer
auccuugucagccagagag

SEQ ID NO: 13323 - RNA, 19 nt, artificial
  Oligomer
caguacagugucauugcuc

SEQ ID NO: 13324 - RNA, 19 nt, artificial
  Oligomer
aaucccgcacaucuucaac

SEQ ID NO: 13325 - RNA, 19 nt, artificial
  Oligomer
aggaaugcgaggaaccaua

SEQ ID NO: 13326 - RNA, 19 nt, artificial
  Oligomer
ugaaagaacgugcuuaaaa

SEQ ID NO: 13327 - RNA, 19 nt, artificial
  Oligomer
uucuccaggcugagacaca

SEQ ID NO: 13328 - RNA, 19 nt, artificial
  Oligomer
acauucuuggucaugccag

SEQ ID NO: 13329 - RNA, 19 nt, artificial
  Oligomer
uccaucaagguacagcuuu

SEQ ID NO: 13330 - RNA, 19 nt, artificial
  Oligomer
cucagcauccugaugaacu

SEQ ID NO: 13331 - RNA, 19 nt, artificial
  Oligomer
gucacagcugcucucauca

SEQ ID NO: 13332 - RNA, 19 nt, artificial
  Oligomer
ucacagcugcucucaucag

SEQ ID NO: 13333 - RNA, 19 nt, artificial
  Oligomer
aucccguagccgcacaaau

SEQ ID NO: 13334 - RNA, 19 nt, artificial
  Oligomer
aagaggaggagguauggga

SEQ ID NO: 13335 - RNA, 19 nt, artificial
  Oligomer
ugagauuuguuucugaagu

SEQ ID NO: 13336 - RNA, 19 nt, artificial
  Oligomer
ucacucuagucccuagaca

SEQ ID NO: 13337 - RNA, 19 nt, artificial
  Oligomer
acuauggccaccuggaaca

SEQ ID NO: 13338 - RNA, 19 nt, artificial
  Oligomer
ugguacggucuggaagaac

SEQ ID NO: 13339 - RNA, 19 nt, artificial
  Oligomer
aaaugaggccauucccauc

SEQ ID NO: 13340 - RNA, 19 nt, artificial
  Oligomer
ucguacaugcggaacauaa

SEQ ID NO: 13341 - RNA, 19 nt, artificial
  Oligomer
aggauguccaggaacucuc

SEQ ID NO: 13342 - RNA, 19 nt, artificial
  Oligomer
ugaaauuucucauccggag

SEQ ID NO: 13343 - RNA, 19 nt, artificial
  Oligomer
aagccaaauccacugcccu

SEQ ID NO: 13344 - RNA, 19 nt, artificial
  Oligomer
uggaagggagacuacugga

SEQ ID NO: 13345 - RNA, 19 nt, artificial
  Oligomer
auagguauugggccagggu

SEQ ID NO: 13346 - RNA, 19 nt, artificial
  Oligomer
uuaaaaccuugggugaaau

SEQ ID NO: 13347 - RNA, 19 nt, artificial
  Oligomer
ggugaaauuaguuguggug

SEQ ID NO: 13348 - RNA, 19 nt, artificial
  Oligomer
aaauggcuugccauggguc

SEQ ID NO: 13349 - RNA, 19 nt, artificial
  Oligomer
uccugcaaggcauuugcca

SEQ ID NO: 13350 - RNA, 19 nt, artificial
  Oligomer
cugacaggccuuuuccaca

SEQ ID NO: 13351 - RNA, 19 nt, artificial
  Oligomer
acaggccuuuuccacauuc

SEQ ID NO: 13352 - RNA, 19 nt, artificial
  Oligomer
acagauguacagcauagug

SEQ ID NO: 13353 - RNA, 19 nt, artificial
  Oligomer
uccugaggucgaacuucuc

SEQ ID NO: 13354 - RNA, 19 nt, artificial
  Oligomer
augucagccagccacucaa

SEQ ID NO: 13355 - RNA, 19 nt, artificial
  Oligomer
cuugaacuguugcaccguc

SEQ ID NO: 13356 - RNA, 19 nt, artificial
  Oligomer
aacagcaagggcuggaaug

SEQ ID NO: 13357 - RNA, 19 nt, artificial
  Oligomer
cucagucucaaugucgcug

SEQ ID NO: 13358 - RNA, 19 nt, artificial
  Oligomer
uccuccuuguccuggaauc

SEQ ID NO: 13359 - RNA, 19 nt, artificial
  Oligomer
aacauggacuccaccaccu

SEQ ID NO: 13360 - RNA, 19 nt, artificial
  Oligomer
aacauaaggcgagacuuuu

SEQ ID NO: 13361 - RNA, 19 nt, artificial
  Oligomer
caaguuaaacagcagcacc

SEQ ID NO: 13362 - RNA, 19 nt, artificial
  Oligomer
cagugcauccacaucuuca

SEQ ID NO: 13363 - RNA, 19 nt, artificial
  Oligomer
uccaguagcuguugcagac

SEQ ID NO: 13364 - RNA, 19 nt, artificial
  Oligomer
ugaaagcacgugauagcca

SEQ ID NO: 13365 - RNA, 19 nt, artificial
  Oligomer
acacugugcgguuucucag

SEQ ID NO: 13366 - RNA, 19 nt, artificial
  Oligomer
aagaugccagcauccaugc

SEQ ID NO: 13367 - RNA, 19 nt, artificial
  Oligomer
auaguacuugucaggucag

SEQ ID NO: 13368 - RNA, 19 nt, artificial
  Oligomer
ucugaagucuggaagcaga

SEQ ID NO: 13369 - RNA, 19 nt, artificial
  Oligomer
ugaagucuggaagcagagg

SEQ ID NO: 13370 - RNA, 19 nt, artificial
  Oligomer
ugggaggugggaaaucaga

SEQ ID NO: 13371 - RNA, 19 nt, artificial
  Oligomer
guuguuguaccacccauca

SEQ ID NO: 13372 - RNA, 19 nt, artificial
  Oligomer
augagcugacaggccuuuu

SEQ ID NO: 13373 - RNA, 19 nt, artificial
  Oligomer
ugggaggcaaagacauaca

SEQ ID NO: 13374 - RNA, 19 nt, artificial
  Oligomer
agugaaaaucuucccaugu

SEQ ID NO: 13375 - RNA, 19 nt, artificial
  Oligomer
ccugaugaacucauccuug

SEQ ID NO: 13376 - RNA, 19 nt, artificial
  Oligomer
uuuccucaggagagccuuu

SEQ ID NO: 13377 - RNA, 19 nt, artificial
  Oligomer
ucuagccaggauaaguccu

SEQ ID NO: 13378 - RNA, 19 nt, artificial
  Oligomer
ucuucagcacuuuguaggc

SEQ ID NO: 13379 - RNA, 19 nt, artificial
  Oligomer
ucaggucagcuugucuucu

SEQ ID NO: 13380 - RNA, 19 nt, artificial
  Oligomer
agcauagugguccugaggu

SEQ ID NO: 13381 - RNA, 19 nt, artificial
  Oligomer
ccaaccagaaguguccaug

SEQ ID NO: 13382 - RNA, 19 nt, artificial
  Oligomer
auugcugggaccaggaaga

SEQ ID NO: 13383 - RNA, 19 nt, artificial
  Oligomer
uggagaacagguacacauu

SEQ ID NO: 13384 - RNA, 19 nt, artificial
  Oligomer
uguguaagacugugaggac

SEQ ID NO: 13385 - RNA, 19 nt, artificial
  Oligomer
agcugcguuggaacuucuc

SEQ ID NO: 13386 - RNA, 19 nt, artificial
  Oligomer
ucucugaggugucaacuca

SEQ ID NO: 13387 - RNA, 19 nt, artificial
  Oligomer
aaaaucuucccaugucagu

SEQ ID NO: 13388 - RNA, 19 nt, artificial
  Oligomer
ucuucccaugucaguuccu

SEQ ID NO: 13389 - RNA, 19 nt, artificial
  Oligomer
ugguugauguccagcaccu

SEQ ID NO: 13390 - RNA, 19 nt, artificial
  Oligomer
aaauccacugcccucaaaa

SEQ ID NO: 13391 - RNA, 19 nt, artificial
  Oligomer
ucuuggagaacagcccauu

SEQ ID NO: 13392 - RNA, 19 nt, artificial
  Oligomer
guugugguguuagacuggg

SEQ ID NO: 13393 - RNA, 19 nt, artificial
  Oligomer
aagcagagguuucacuuug

SEQ ID NO: 13394 - RNA, 19 nt, artificial
  Oligomer
cuucucacucuagucccua

SEQ ID NO: 13395 - RNA, 19 nt, artificial
  Oligomer
aagaacagaggugaggugu

SEQ ID NO: 13396 - RNA, 19 nt, artificial
  Oligomer
cucaaaccucugcucaacu

SEQ ID NO: 13397 - RNA, 19 nt, artificial
  Oligomer
accacccaucaaaucgcug

SEQ ID NO: 13398 - RNA, 19 nt, artificial
  Oligomer
caucaaaucgcugcaccuc

SEQ ID NO: 13399 - RNA, 19 nt, artificial
  Oligomer
cuuacagaacacuuggcag

SEQ ID NO: 13400 - RNA, 19 nt, artificial
  Oligomer
cccacuaacacugacaccu

SEQ ID NO: 13401 - RNA, 19 nt, artificial
  Oligomer
acugacaccucaaacuuau

SEQ ID NO: 13402 - RNA, 19 nt, artificial
  Oligomer
cuccaaaugguccaucaag

SEQ ID NO: 13403 - RNA, 19 nt, artificial
  Oligomer
uggugggaggcaaagacau

SEQ ID NO: 13404 - RNA, 19 nt, artificial
  Oligomer
aagguuucucgcaggaagg

SEQ ID NO: 13405 - RNA, 19 nt, artificial
  Oligomer
ucagcauccugaugaacuc

SEQ ID NO: 13406 - RNA, 19 nt, artificial
  Oligomer
uccucaggagagccuuuca

SEQ ID NO: 13407 - RNA, 19 nt, artificial
  Oligomer
acagguagccauugccauc

SEQ ID NO: 13408 - RNA, 19 nt, artificial
  Oligomer
cucaaaauagucacgaaca

SEQ ID NO: 13409 - RNA, 19 nt, artificial
  Oligomer
uccagaaauggccgguauc

SEQ ID NO: 13410 - RNA, 19 nt, artificial
  Oligomer
ugcgaauguugaggaacuc

SEQ ID NO: 13411 - RNA, 19 nt, artificial
  Oligomer
cauacagacaugcacacac

SEQ ID NO: 13412 - RNA, 19 nt, artificial
  Oligomer
augcacacacauaguacuu

SEQ ID NO: 13413 - RNA, 19 nt, artificial
  Oligomer
auggaugaugagcaggaca

SEQ ID NO: 13414 - RNA, 19 nt, artificial
  Oligomer
augagcaggacauagagca

SEQ ID NO: 13415 - RNA, 19 nt, artificial
  Oligomer
acuguguaagacugugagg

SEQ ID NO: 13416 - RNA, 19 nt, artificial
  Oligomer
agcgguugaggaagguuuc

SEQ ID NO: 13417 - RNA, 19 nt, artificial
  Oligomer
acagcugcucucaucagcu

SEQ ID NO: 13418 - RNA, 19 nt, artificial
  Oligomer
ugcagggugguauuucgga

SEQ ID NO: 13419 - RNA, 19 nt, artificial
  Oligomer
cacaucuucaaccaacaca

SEQ ID NO: 13420 - RNA, 19 nt, artificial
  Oligomer
ucagcacuuuguaggcuug

SEQ ID NO: 13421 - RNA, 19 nt, artificial
  Oligomer
gaaauggccgguauccugu

SEQ ID NO: 13422 - RNA, 19 nt, artificial
  Oligomer
gucugaaagcacgugauag

SEQ ID NO: 13423 - RNA, 19 nt, artificial
  Oligomer
cagagguuucacuuugccc

SEQ ID NO: 13424 - RNA, 19 nt, artificial
  Oligomer
ucuagucccuagacacugc

SEQ ID NO: 13425 - RNA, 19 nt, artificial
  Oligomer
uaggaagaacagaggugag

SEQ ID NO: 13426 - RNA, 19 nt, artificial
  Oligomer
aauagacuccgguucagaa

SEQ ID NO: 13427 - RNA, 19 nt, artificial
  Oligomer
caaacuuaugccacuccug

SEQ ID NO: 13428 - RNA, 19 nt, artificial
  Oligomer
aagcccaugaugaaaauaa

SEQ ID NO: 13429 - RNA, 19 nt, artificial
  Oligomer
uggaugaugagcaggacau

SEQ ID NO: 13430 - RNA, 19 nt, artificial
  Oligomer
uucucgcaggaaggugaug

SEQ ID NO: 13431 - RNA, 19 nt, artificial
  Oligomer
agucucugaggugucaacu

SEQ ID NO: 13432 - RNA, 19 nt, artificial
  Oligomer
cugaggugucaacucaguc

SEQ ID NO: 13433 - RNA, 19 nt, artificial
  Oligomer
cauccugaugaacucaucc

SEQ ID NO: 13434 - RNA, 19 nt, artificial
  Oligomer
agagccuuucaugaagacc

SEQ ID NO: 13435 - RNA, 19 nt, artificial
  Oligomer
ugccugaaaaaggucucca

SEQ ID NO: 13436 - RNA, 19 nt, artificial
  Oligomer
gguauuucggauuucuuca

SEQ ID NO: 13437 - RNA, 19 nt, artificial
  Oligomer
accaggucugaaagcacgu

SEQ ID NO: 13438 - RNA, 19 nt, artificial
  Oligomer
ugagacacauccugguccu

SEQ ID NO: 13439 - RNA, 19 nt, artificial
  Oligomer
aggaagaacagaggugagg

SEQ ID NO: 13440 - RNA, 19 nt, artificial
  Oligomer
ugaugagcugacaggccuu

SEQ ID NO: 13441 - RNA, 19 nt, artificial
  Oligomer
caggccugugaauagacuc

SEQ ID NO: 13442 - RNA, 19 nt, artificial
  Oligomer
acgcugaucuccaccuucu

SEQ ID NO: 13443 - RNA, 19 nt, artificial
  Oligomer
ucaguuccuccuuguccug

SEQ ID NO: 13444 - RNA, 19 nt, artificial
  Oligomer
uuccuccuuguccuggaau

SEQ ID NO: 13445 - RNA, 19 nt, artificial
  Oligomer
ccucaaaauagucacgaac

SEQ ID NO: 13446 - RNA, 19 nt, artificial
  Oligomer
aaagacauugggcugcaga

SEQ ID NO: 13447 - RNA, 19 nt, artificial
  Oligomer
aagacauugggcugcagag

SEQ ID NO: 13448 - RNA, 19 nt, artificial
  Oligomer
acaucuucaaccaacacau

SEQ ID NO: 13449 - RNA, 19 nt, artificial
  Oligomer
acgugauagccaaagaaga

SEQ ID NO: 13450 - RNA, 19 nt, artificial
  Oligomer
cugaggagcauugcauaca

SEQ ID NO: 13451 - RNA, 19 nt, artificial
  Oligomer
ugaggagcauugcauacau

SEQ ID NO: 13452 - RNA, 19 nt, artificial
  Oligomer
cagaagaggaggagguaug

SEQ ID NO: 13453 - RNA, 19 nt, artificial
  Oligomer
cauaguacuugucagguca

SEQ ID NO: 13454 - RNA, 19 nt, artificial
  Oligomer
ccuacuucucacucuaguc

SEQ ID NO: 13455 - RNA, 19 nt, artificial
  Oligomer
uggaacaagguugggaggu

SEQ ID NO: 13456 - RNA, 19 nt, artificial
  Oligomer
ccuagaaguucucauaaug

SEQ ID NO: 13457 - RNA, 19 nt, artificial
  Oligomer
uccugccuguugaugagcu

SEQ ID NO: 13458 - RNA, 19 nt, artificial
  Oligomer
ugacaggccuuuuccacau

SEQ ID NO: 13459 - RNA, 19 nt, artificial
  Oligomer
gucauucuccuccaccucu

SEQ ID NO: 13460 - RNA, 19 nt, artificial
  Oligomer
acuaacacugacaccucaa

SEQ ID NO: 13461 - RNA, 19 nt, artificial
  Oligomer
ugggaccaggaagaagaug

SEQ ID NO: 13462 - RNA, 19 nt, artificial
  Oligomer
caggacauagagcaggaug

SEQ ID NO: 13463 - RNA, 19 nt, artificial
  Oligomer
caaugaagcgcuugaacug

SEQ ID NO: 13464 - RNA, 19 nt, artificial
  Oligomer
acagaucauauccuggcug

SEQ ID NO: 13465 - RNA, 19 nt, artificial
  Oligomer
cuugaugacuucaggcacc

SEQ ID NO: 13466 - RNA, 19 nt, artificial
  Oligomer
ugaagcggagcucgcuauu

SEQ ID NO: 13467 - RNA, 19 nt, artificial
  Oligomer
ucccgcagcaugaagugaa

SEQ ID NO: 13468 - RNA, 19 nt, artificial
  Oligomer
ccuuucaugaagaccacca

SEQ ID NO: 13469 - RNA, 19 nt, artificial
  Oligomer
gugguauuucggauuucuu

SEQ ID NO: 13470 - RNA, 19 nt, artificial
  Oligomer
ccgcacaucuucaaccaac

SEQ ID NO: 13471 - RNA, 19 nt, artificial
  Oligomer
uccacaucuucagcacuuu

SEQ ID NO: 13472 - RNA, 19 nt, artificial
  Oligomer
agaagaggaggagguaugg

SEQ ID NO: 13473 - RNA, 19 nt, artificial
  Oligomer
cugcauccuuacacucacc

SEQ ID NO: 13474 - RNA, 19 nt, artificial
  Oligomer
cacacauacagacaugcac

SEQ ID NO: 13475 - RNA, 19 nt, artificial
  Oligomer
ucagcuugucuucugagau

SEQ ID NO: 13476 - RNA, 19 nt, artificial
  Oligomer
uggaagcagagguuucacu

SEQ ID NO: 13477 - RNA, 19 nt, artificial
  Oligomer
ucauaauggugggagaagu

SEQ ID NO: 13478 - RNA, 19 nt, artificial
  Oligomer
cugaggucgaacuucucag

SEQ ID NO: 13479 - RNA, 19 nt, artificial
  Oligomer
cucccacuaacacugacac

SEQ ID NO: 13480 - RNA, 19 nt, artificial
  Oligomer
ugcccugacuuguacucaa

SEQ ID NO: 13481 - RNA, 19 nt, artificial
  Oligomer
gugagcaagauguaggaga

SEQ ID NO: 13482 - RNA, 19 nt, artificial
  Oligomer
acuuuuccucaggagagcc

SEQ ID NO: 13483 - RNA, 19 nt, artificial
  Oligomer
aggugccugaaaaaggucu

SEQ ID NO: 13484 - RNA, 19 nt, artificial
  Oligomer
agcagcaccaggucauacu

SEQ ID NO: 13485 - RNA, 19 nt, artificial
  Oligomer
gaucuugagcagcagagug

SEQ ID NO: 13486 - RNA, 19 nt, artificial
  Oligomer
ucaaucuccuucuuggaga

SEQ ID NO: 13487 - RNA, 19 nt, artificial
  Oligomer
cuuggagaacagcccauuc

SEQ ID NO: 13488 - RNA, 19 nt, artificial
  Oligomer
uggagaacagcccauuccu

SEQ ID NO: 13489 - RNA, 19 nt, artificial
  Oligomer
agcagcucuagccaggaua

SEQ ID NO: 13490 - RNA, 19 nt, artificial
  Oligomer
agugcauccacaucuucag

SEQ ID NO: 13491 - RNA, 19 nt, artificial
  Oligomer
gaugguguugcuaaggucu

SEQ ID NO: 13492 - RNA, 19 nt, artificial
  Oligomer
ugccgaguggguuucugua

SEQ ID NO: 13493 - RNA, 19 nt, artificial
  Oligomer
acucuagucccuagacacu

SEQ ID NO: 13494 - RNA, 19 nt, artificial
  Oligomer
uccugcagggaguugaaga

SEQ ID NO: 13495 - RNA, 19 nt, artificial
  Oligomer
acacugacaccucaaacuu

SEQ ID NO: 13496 - RNA, 19 nt, artificial
  Oligomer
gaugaugagcaggacauag

SEQ ID NO: 13497 - RNA, 19 nt, artificial
  Oligomer
uacggucuggaagaaccac

SEQ ID NO: 13498 - RNA, 19 nt, artificial
  Oligomer
acagguacacauucaccac

SEQ ID NO: 13499 - RNA, 19 nt, artificial
  Oligomer
uggcccacacuguguaaga

SEQ ID NO: 13500 - RNA, 19 nt, artificial
  Oligomer
guuaaacagcagcaccagg

SEQ ID NO: 13501 - RNA, 19 nt, artificial
  Oligomer
uggacaggacgaaguugac

SEQ ID NO: 13502 - RNA, 19 nt, artificial
  Oligomer
uccuuguggccuugccauu

SEQ ID NO: 13503 - RNA, 19 nt, artificial
  Oligomer
ucaccaaagggaagcaaca

SEQ ID NO: 13504 - RNA, 19 nt, artificial
  Oligomer
accuccugcaaggcauuug

SEQ ID NO: 13505 - RNA, 19 nt, artificial
  Oligomer
cacugcauccuuacacuca

SEQ ID NO: 13506 - RNA, 19 nt, artificial
  Oligomer
ucuggaagcagagguuuca

SEQ ID NO: 13507 - RNA, 19 nt, artificial
  Oligomer
ugguggucauucuccucca

SEQ ID NO: 13508 - RNA, 19 nt, artificial
  Oligomer
agaaguguccaugcuagag

SEQ ID NO: 13509 - RNA, 19 nt, artificial
  Oligomer
aggaucaggagcagcacaa

SEQ ID NO: 13510 - RNA, 19 nt, artificial
  Oligomer
gcugcguuggaacuucucu

SEQ ID NO: 13511 - RNA, 19 nt, artificial
  Oligomer
gcuggaaugacguuaccuu

SEQ ID NO: 13512 - RNA, 19 nt, artificial
  Oligomer
ucugaggugucaacucagu

SEQ ID NO: 13513 - RNA, 19 nt, artificial
  Oligomer
augaacucauccuuggaaa

SEQ ID NO: 13514 - RNA, 19 nt, artificial
  Oligomer
agccauugccauccuuguc

SEQ ID NO: 13515 - RNA, 19 nt, artificial
  Oligomer
aguuaaacagcagcaccag

SEQ ID NO: 13516 - RNA, 19 nt, artificial
  Oligomer
aaaccaguagcggucacca

SEQ ID NO: 13517 - RNA, 19 nt, artificial
  Oligomer
agccgcacaaauuguucaa

SEQ ID NO: 13518 - RNA, 19 nt, artificial
  Oligomer
aaugggagacaagcccagu

SEQ ID NO: 13519 - RNA, 19 nt, artificial
  Oligomer
ccacaucuucagcacuuug

SEQ ID NO: 13520 - RNA, 19 nt, artificial
  Oligomer
aguggcagcuggcauuucu

SEQ ID NO: 13521 - RNA, 19 nt, artificial
  Oligomer
uggcagcuggcauuucuca

SEQ ID NO: 13522 - RNA, 19 nt, artificial
  Oligomer
aguugugguguuagacugg

SEQ ID NO: 13523 - RNA, 19 nt, artificial
  Oligomer
uaccuccugcaaggcauuu

SEQ ID NO: 13524 - RNA, 19 nt, artificial
  Oligomer
cucuagucccuagacacug

SEQ ID NO: 13525 - RNA, 19 nt, artificial
  Oligomer
accauuucuccaggcugag

SEQ ID NO: 13526 - RNA, 19 nt, artificial
  Oligomer
uuugaggauggaggcaaaa

SEQ ID NO: 13527 - RNA, 19 nt, artificial
  Oligomer
cugcccugacuuguacuca

SEQ ID NO: 13528 - RNA, 19 nt, artificial
  Oligomer
auggaagaggccaggaaag

SEQ ID NO: 13529 - RNA, 19 nt, artificial
  Oligomer
agcaagauguaggagaaca

SEQ ID NO: 13530 - RNA, 19 nt, artificial
  Oligomer
cucugaggugucaacucag

SEQ ID NO: 13531 - RNA, 19 nt, artificial
  Oligomer
acucagucucaaugucgcu

SEQ ID NO: 13532 - RNA, 19 nt, artificial
  Oligomer
ugggagagggacagaucau

SEQ ID NO: 13533 - RNA, 19 nt, artificial
  Oligomer
agguccuugaugacuucag

SEQ ID NO: 13534 - RNA, 19 nt, artificial
  Oligomer
guccuugaugacuucaggc

SEQ ID NO: 13535 - RNA, 19 nt, artificial
  Oligomer
ccaugucaguuccuccuug

SEQ ID NO: 13536 - RNA, 19 nt, artificial
  Oligomer
cucgaugaaggaucucagc

SEQ ID NO: 13537 - RNA, 19 nt, artificial
  Oligomer
cucuuccuccaaguuaaac

SEQ ID NO: 13538 - RNA, 19 nt, artificial
  Oligomer
ccucuugaaauuucucauc

SEQ ID NO: 13539 - RNA, 19 nt, artificial
  Oligomer
aauagucacgaacaacaga

SEQ ID NO: 13540 - RNA, 19 nt, artificial
  Oligomer
uucuuggagaacagcccau

SEQ ID NO: 13541 - RNA, 19 nt, artificial
  Oligomer
aggacgauggugcugaaca

SEQ ID NO: 13542 - RNA, 19 nt, artificial
  Oligomer
gauaaguccugguuguaca

SEQ ID NO: 13543 - RNA, 19 nt, artificial
  Oligomer
uguuuucugcaggaagcug

SEQ ID NO: 13544 - RNA, 19 nt, artificial
  Oligomer
cugaaagcacgugauagcc

SEQ ID NO: 13545 - RNA, 19 nt, artificial
  Oligomer
uaaaaccuugggugaaauu

SEQ ID NO: 13546 - RNA, 19 nt, artificial
  Oligomer
cuaagaugccagcauccau

SEQ ID NO: 13547 - RNA, 19 nt, artificial
  Oligomer
cacucuagucccuagacac

SEQ ID NO: 13548 - RNA, 19 nt, artificial
  Oligomer
agaacagaggugaggugug

SEQ ID NO: 13549 - RNA, 19 nt, artificial
  Oligomer
cauaauggugggagaagug

SEQ ID NO: 13550 - RNA, 19 nt, artificial
  Oligomer
ugaggucgaacuucucagc

SEQ ID NO: 13551 - RNA, 19 nt, artificial
  Oligomer
gacggaugacuugaagacc

SEQ ID NO: 13552 - RNA, 19 nt, artificial
  Oligomer
cuugaagaccaggucuuug

SEQ ID NO: 13553 - RNA, 19 nt, artificial
  Oligomer
ccucaaacuuaugccacuc

SEQ ID NO: 13554 - RNA, 19 nt, artificial
  Oligomer
aagaaccaccaguaauacu

SEQ ID NO: 13555 - RNA, 19 nt, artificial
  Oligomer
cgguaguucucaaugaagc

SEQ ID NO: 13556 - RNA, 19 nt, artificial
  Oligomer
ugcagucucugagguguca

SEQ ID NO: 13557 - RNA, 19 nt, artificial
  Oligomer
uauuguggucccgcagcau

SEQ ID NO: 13558 - RNA, 19 nt, artificial
  Oligomer
aaagucguacaugcggaac

SEQ ID NO: 13559 - RNA, 19 nt, artificial
  Oligomer
aaaaggucuccaggaggug

SEQ ID NO: 13560 - RNA, 19 nt, artificial
  Oligomer
uaugccagacaaagacauu

SEQ ID NO: 13561 - RNA, 19 nt, artificial
  Oligomer
acaucuucagcacuuugua

SEQ ID NO: 13562 - RNA, 19 nt, artificial
  Oligomer
acgcucaccaggucugaaa

SEQ ID NO: 13563 - RNA, 19 nt, artificial
  Oligomer
agaacgugcuuaaaaccuu

SEQ ID NO: 13564 - RNA, 19 nt, artificial
  Oligomer
uacagacaugcacacacau

SEQ ID NO: 13565 - RNA, 19 nt, artificial
  Oligomer
ucuccaggcugagacacau

SEQ ID NO: 13566 - RNA, 19 nt, artificial
  Oligomer
auguagaugugcacagaca

SEQ ID NO: 13567 - RNA, 19 nt, artificial
  Oligomer
accucucggaugaugucag

SEQ ID NO: 13568 - RNA, 19 nt, artificial
  Oligomer
ugaguagaucucccugagg

SEQ ID NO: 13569 - RNA, 19 nt, artificial
  Oligomer
accauggaugaugagcagg

SEQ ID NO: 13570 - RNA, 19 nt, artificial
  Oligomer
aaguggugggaggcaaaga

SEQ ID NO: 13571 - RNA, 19 nt, artificial
  Oligomer
caggaaagaggcaagagag

SEQ ID NO: 13572 - RNA, 19 nt, artificial
  Oligomer
aggaaagaggcaagagagg

SEQ ID NO: 13573 - RNA, 19 nt, artificial
  Oligomer
gucaacucagucucaaugu

SEQ ID NO: 13574 - RNA, 19 nt, artificial
  Oligomer
aacagcagcaccaggucau

SEQ ID NO: 13575 - RNA, 19 nt, artificial
  Oligomer
ugcuggacaggacgaaguu

SEQ ID NO: 13576 - RNA, 19 nt, artificial
  Oligomer
ccaucuaccacacggaucu

SEQ ID NO: 13577 - RNA, 19 nt, artificial
  Oligomer
gagagugcaggguugaugu

SEQ ID NO: 13578 - RNA, 19 nt, artificial
  Oligomer
agcgauguucugguaggug

SEQ ID NO: 13579 - RNA, 19 nt, artificial
  Oligomer
aagagggcugaggagcauu

SEQ ID NO: 13580 - RNA, 19 nt, artificial
  Oligomer
ucugagauuuguuucugaa

SEQ ID NO: 13581 - RNA, 19 nt, artificial
  Oligomer
auuucuccaggcugagaca

SEQ ID NO: 13582 - RNA, 19 nt, artificial
  Oligomer
gguuguuguaccacccauc

SEQ ID NO: 13583 - RNA, 19 nt, artificial
  Oligomer
guagaugugcacagacacc

SEQ ID NO: 13584 - RNA, 19 nt, artificial
  Oligomer
cugacggaugacuugaaga

SEQ ID NO: 13585 - RNA, 19 nt, artificial
  Oligomer
caccucaaacuuaugccac

SEQ ID NO: 13586 - RNA, 19 nt, artificial
  Oligomer
ccucuccaaaugguccauc

SEQ ID NO: 13587 - RNA, 19 nt, artificial
  Oligomer
ugaugacuucaggcaccuc

SEQ ID NO: 13588 - RNA, 19 nt, artificial
  Oligomer
gaaaaucuucccaugucag

SEQ ID NO: 13589 - RNA, 19 nt, artificial
  Oligomer
gccauugccauccuuguca

SEQ ID NO: 13590 - RNA, 19 nt, artificial
  Oligomer
ccugaaaaaggucuccagg

SEQ ID NO: 13591 - RNA, 19 nt, artificial
  Oligomer
aucuccuucuuggagaaca

SEQ ID NO: 13592 - RNA, 19 nt, artificial
  Oligomer
caaauuguucaaggacgau

SEQ ID NO: 13593 - RNA, 19 nt, artificial
  Oligomer
gugcgggaaaacuucagug

SEQ ID NO: 13594 - RNA, 19 nt, artificial
  Oligomer
gaaaucccgcacaucuuca

SEQ ID NO: 13595 - RNA, 19 nt, artificial
  Oligomer
uauacuccgggaguguuuu

SEQ ID NO: 13596 - RNA, 19 nt, artificial
  Oligomer
ucuguaaauggcuugccau

SEQ ID NO: 13597 - RNA, 19 nt, artificial
  Oligomer
acacacauacagacaugca

SEQ ID NO: 13598 - RNA, 19 nt, artificial
  Oligomer
gauuuguuucugaagucug

SEQ ID NO: 13599 - RNA, 19 nt, artificial
  Oligomer
gccuuuuccacauucuugg

SEQ ID NO: 13600 - RNA, 19 nt, artificial
  Oligomer
guucagaaccuucuggaag

SEQ ID NO: 13601 - RNA, 19 nt, artificial
  Oligomer
ccagaaguguccaugcuag

SEQ ID NO: 13602 - RNA, 19 nt, artificial
  Oligomer
ccucccacuaacacugaca

SEQ ID NO: 13603 - RNA, 19 nt, artificial
  Oligomer
ccacuaacacugacaccuc

SEQ ID NO: 13604 - RNA, 19 nt, artificial
  Oligomer
accucaaacuuaugccacu

SEQ ID NO: 13605 - RNA, 19 nt, artificial
  Oligomer
gcugaucuccaccuucuuc

SEQ ID NO: 13606 - RNA, 19 nt, artificial
  Oligomer
gggcucagggauuagaaug

SEQ ID NO: 13607 - RNA, 19 nt, artificial
  Oligomer
uuucucgcaggaaggugau

SEQ ID NO: 13608 - RNA, 19 nt, artificial
  Oligomer
cauggugagcaagauguag

SEQ ID NO: 13609 - RNA, 19 nt, artificial
  Oligomer
auccuggcugauguaggag

SEQ ID NO: 13610 - RNA, 19 nt, artificial
  Oligomer
guuguuggagaucucgaug

SEQ ID NO: 13611 - RNA, 19 nt, artificial
  Oligomer
agcauccugaugaacucau

SEQ ID NO: 13612 - RNA, 19 nt, artificial
  Oligomer
aggcgagacuuuuccucag

SEQ ID NO: 13613 - RNA, 19 nt, artificial
  Oligomer
agacuuuuccucaggagag

SEQ ID NO: 13614 - RNA, 19 nt, artificial
  Oligomer
gguguuuugaaaugcagaa

SEQ ID NO: 13615 - RNA, 19 nt, artificial
  Oligomer
gagaacuauccaaaacuaa

SEQ ID NO: 13616 - RNA, 19 nt, artificial
  Oligomer
ggaggugacccgaauuaua

SEQ ID NO: 13617 - RNA, 19 nt, artificial
  Oligomer
agaaguggacgcaacuuaa

SEQ ID NO: 13618 - RNA, 19 nt, artificial
  Oligomer
caagguguuuugaaaugca

SEQ ID NO: 13619 - RNA, 19 nt, artificial
  Oligomer
gagagauugagaagggaaa

SEQ ID NO: 13620 - RNA, 19 nt, artificial
  Oligomer
gguucauauuggacugaua

SEQ ID NO: 13621 - RNA, 19 nt, artificial
  Oligomer
ggaagugucuagaggaaua

SEQ ID NO: 13622 - RNA, 19 nt, artificial
  Oligomer
gguacagcagaaaggagaa

SEQ ID NO: 13623 - RNA, 19 nt, artificial
  Oligomer
agguguuuugaaaugcaga

SEQ ID NO: 13624 - RNA, 19 nt, artificial
  Oligomer
gaauauggugggcacagaa

SEQ ID NO: 13625 - RNA, 19 nt, artificial
  Oligomer
gcaguaagcuaucuucaaa

SEQ ID NO: 13626 - RNA, 19 nt, artificial
  Oligomer
gggaagaaacaaaguugaa

SEQ ID NO: 13627 - RNA, 19 nt, artificial
  Oligomer
cagcaauacuaagggaaga

SEQ ID NO: 13628 - RNA, 19 nt, artificial
  Oligomer
gcuccuguguaaaacuaua

SEQ ID NO: 13629 - RNA, 19 nt, artificial
  Oligomer
cgugaccaaggaagugaaa

SEQ ID NO: 13630 - RNA, 19 nt, artificial
  Oligomer
ugaucaagguguuuugaaa

SEQ ID NO: 13631 - RNA, 19 nt, artificial
  Oligomer
caggaagugucuagaggaa

SEQ ID NO: 13632 - RNA, 19 nt, artificial
  Oligomer
cagagaggucuaacaccaa

SEQ ID NO: 13633 - RNA, 19 nt, artificial
  Oligomer
ccaagaugcagagagagaa

SEQ ID NO: 13634 - RNA, 19 nt, artificial
  Oligomer
ggagaagaauuaaaugcca

SEQ ID NO: 13635 - RNA, 19 nt, artificial
  Oligomer
guuggaaaauggagaagaa

SEQ ID NO: 13636 - RNA, 19 nt, artificial
  Oligomer
uggcaaaaggagaagaaaa

SEQ ID NO: 13637 - RNA, 19 nt, artificial
  Oligomer
ggaaguauggcaugaacau

SEQ ID NO: 13638 - RNA, 19 nt, artificial
  Oligomer
ccaucuuugauaucacuaa

SEQ ID NO: 13639 - RNA, 19 nt, artificial
  Oligomer
cuggcaaaaggagaagaaa

SEQ ID NO: 13640 - RNA, 19 nt, artificial
  Oligomer
gcaucuacuggcaaaagga

SEQ ID NO: 13641 - RNA, 19 nt, artificial
  Oligomer
ggaguugaacagcaaaaga

SEQ ID NO: 13642 - RNA, 19 nt, artificial
  Oligomer
gagacuaucugauuuccua

SEQ ID NO: 13643 - RNA, 19 nt, artificial
  Oligomer
agugcugcuggaaguagaa

SEQ ID NO: 13644 - RNA, 19 nt, artificial
  Oligomer
ggaauauggugggcacaga

SEQ ID NO: 13645 - RNA, 19 nt, artificial
  Oligomer
cacauggcugggauuuaaa

SEQ ID NO: 13646 - RNA, 19 nt, artificial
  Oligomer
gaggugacccgaauuauaa

SEQ ID NO: 13647 - RNA, 19 nt, artificial
  Oligomer
ccaguguuauuaaugacaa

SEQ ID NO: 13648 - RNA, 19 nt, artificial
  Oligomer
gaggaaugagagauugaga

SEQ ID NO: 13649 - RNA, 19 nt, artificial
  Oligomer
ccaagauccugaaacugag

SEQ ID NO: 13650 - RNA, 19 nt, artificial
  Oligomer
ggcaaaaggagaagaaaau

SEQ ID NO: 13651 - RNA, 19 nt, artificial
  Oligomer
aaaccuugcuccuguguaa

SEQ ID NO: 13652 - RNA, 19 nt, artificial
  Oligomer
acgucaaagcaguagucaa

SEQ ID NO: 13653 - RNA, 19 nt, artificial
  Oligomer
cauauauaugucaggcaaa

SEQ ID NO: 13654 - RNA, 19 nt, artificial
  Oligomer
cuaugcuguuagcagcaaa

SEQ ID NO: 13655 - RNA, 19 nt, artificial
  Oligomer
ggaagugaaagaaguggca

SEQ ID NO: 13656 - RNA, 19 nt, artificial
  Oligomer
acgugaccaaggaagugaa

SEQ ID NO: 13657 - RNA, 19 nt, artificial
  Oligomer
aguugaaccguuucuuuaa

SEQ ID NO: 13658 - RNA, 19 nt, artificial
  Oligomer
gaucguuguuuacagugua

SEQ ID NO: 13659 - RNA, 19 nt, artificial
  Oligomer
gaggaaagggauaguccaa

SEQ ID NO: 13660 - RNA, 19 nt, artificial
  Oligomer
aaaggagaacuauccaaaa

SEQ ID NO: 13661 - RNA, 19 nt, artificial
  Oligomer
gaaaggagaacuauccaaa

SEQ ID NO: 13662 - RNA, 19 nt, artificial
  Oligomer
ggagacuaauggaaauauu

SEQ ID NO: 13663 - RNA, 19 nt, artificial
  Oligomer
ggaagggacuuuagagaau

SEQ ID NO: 13664 - RNA, 19 nt, artificial
  Oligomer
acgaguguguuguucugaa

SEQ ID NO: 13665 - RNA, 19 nt, artificial
  Oligomer
gaguugaacagcaaaagaa

SEQ ID NO: 13666 - RNA, 19 nt, artificial
  Oligomer
cugaaaaucuggaguugaa

SEQ ID NO: 13667 - RNA, 19 nt, artificial
  Oligomer
guuugaccucauuuguaaa

SEQ ID NO: 13668 - RNA, 19 nt, artificial
  Oligomer
ggaggaaagggauagucca

SEQ ID NO: 13669 - RNA, 19 nt, artificial
  Oligomer
gcaggaagugucuagagga

SEQ ID NO: 13670 - RNA, 19 nt, artificial
  Oligomer
aguggagucuuacccugaa

SEQ ID NO: 13671 - RNA, 19 nt, artificial
  Oligomer
gcauuuuccugauaaccug

SEQ ID NO: 13672 - RNA, 19 nt, artificial
  Oligomer
agaaaauggugcugacuau

SEQ ID NO: 13673 - RNA, 19 nt, artificial
  Oligomer
aguacugagugaacucaaa

SEQ ID NO: 13674 - RNA, 19 nt, artificial
  Oligomer
ccacauggcugggauuuaa

SEQ ID NO: 13675 - RNA, 19 nt, artificial
  Oligomer
aguuugaccucauuuguaa

SEQ ID NO: 13676 - RNA, 19 nt, artificial
  Oligomer
aggugacccgaauuauaaa

SEQ ID NO: 13677 - RNA, 19 nt, artificial
  Oligomer
gcucuuaggugcuucuuca

SEQ ID NO: 13678 - RNA, 19 nt, artificial
  Oligomer
ccaccuugcccuuuacgua

SEQ ID NO: 13679 - RNA, 19 nt, artificial
  Oligomer
cuuucacuuuugacccuaa

SEQ ID NO: 13680 - RNA, 19 nt, artificial
  Oligomer
gggucuucuacgugagcaa

SEQ ID NO: 13681 - RNA, 19 nt, artificial
  Oligomer
caggaauacuuaacucaau

SEQ ID NO: 13682 - RNA, 19 nt, artificial
  Oligomer
gaaugauuuagguacguca

SEQ ID NO: 13683 - RNA, 19 nt, artificial
  Oligomer
gggacuuuagagaauacca

SEQ ID NO: 13684 - RNA, 19 nt, artificial
  Oligomer
gagugaaucagaccuucaa

SEQ ID NO: 13685 - RNA, 19 nt, artificial
  Oligomer
ccugguuggaaaauggaga

SEQ ID NO: 13686 - RNA, 19 nt, artificial
  Oligomer
cacaucucauggcagcuaa

SEQ ID NO: 13687 - RNA, 19 nt, artificial
  Oligomer
caugacuccuuucucuaaa

SEQ ID NO: 13688 - RNA, 19 nt, artificial
  Oligomer
ggauaguccaaagacuuaa

SEQ ID NO: 13689 - RNA, 19 nt, artificial
  Oligomer
gggauaguccaaagacuua

SEQ ID NO: 13690 - RNA, 19 nt, artificial
  Oligomer
ggucuuacuuggguccaaa

SEQ ID NO: 13691 - RNA, 19 nt, artificial
  Oligomer
ggacugauaaucucuuuaa

SEQ ID NO: 13692 - RNA, 19 nt, artificial
  Oligomer
cucugacauguaagacgaa

SEQ ID NO: 13693 - RNA, 19 nt, artificial
  Oligomer
caaaacuaauuuccucuga

SEQ ID NO: 13694 - RNA, 19 nt, artificial
  Oligomer
ggagaacuauccaaaacua

SEQ ID NO: 13695 - RNA, 19 nt, artificial
  Oligomer
aagugcugcuggaaguaga

SEQ ID NO: 13696 - RNA, 19 nt, artificial
  Oligomer
aggaaugagagauugagaa

SEQ ID NO: 13697 - RNA, 19 nt, artificial
  Oligomer
gcuucaugugucucaucaa

SEQ ID NO: 13698 - RNA, 19 nt, artificial
  Oligomer
cucucugaagauuacccaa

SEQ ID NO: 13699 - RNA, 19 nt, artificial
  Oligomer
ugcuguucauguuacucau

SEQ ID NO: 13700 - RNA, 19 nt, artificial
  Oligomer
ccaauguaaugcauaggaa

SEQ ID NO: 13701 - RNA, 19 nt, artificial
  Oligomer
agacuaucugauuuccuaa

SEQ ID NO: 13702 - RNA, 19 nt, artificial
  Oligomer
agucuuacccugaaaucaa

SEQ ID NO: 13703 - RNA, 19 nt, artificial
  Oligomer
ccuguuuugcaccugggaa

SEQ ID NO: 13704 - RNA, 19 nt, artificial
  Oligomer
acaggaauacuuaacucaa

SEQ ID NO: 13705 - RNA, 19 nt, artificial
  Oligomer
ccaacauaagguacuagca

SEQ ID NO: 13706 - RNA, 19 nt, artificial
  Oligomer
ggcuuuuucuccuugguau

SEQ ID NO: 13707 - RNA, 19 nt, artificial
  Oligomer
gaacucaaacccucuguaa

SEQ ID NO: 13708 - RNA, 19 nt, artificial
  Oligomer
cagcaagcugugaaacuaa

SEQ ID NO: 13709 - RNA, 19 nt, artificial
  Oligomer
gaagggacuuuagagaaua

SEQ ID NO: 13710 - RNA, 19 nt, artificial
  Oligomer
guggagucuuacccugaaa

SEQ ID NO: 13711 - RNA, 19 nt, artificial
  Oligomer
gucccaccuccauuugcaa

SEQ ID NO: 13712 - RNA, 19 nt, artificial
  Oligomer
ccaaguguccauaccucaa

SEQ ID NO: 13713 - RNA, 19 nt, artificial
  Oligomer
gcaauacuaagggaagaaa

SEQ ID NO: 13714 - RNA, 19 nt, artificial
  Oligomer
gcagauacuuugucagcaa

SEQ ID NO: 13715 - RNA, 19 nt, artificial
  Oligomer
cuggaguugaacagcaaaa

SEQ ID NO: 13716 - RNA, 19 nt, artificial
  Oligomer
agagaacuggaaagacaua

SEQ ID NO: 13717 - RNA, 19 nt, artificial
  Oligomer
cguuaucagucaaagcuga

SEQ ID NO: 13718 - RNA, 19 nt, artificial
  Oligomer
caaacccucuguaaaguaa

SEQ ID NO: 13719 - RNA, 19 nt, artificial
  Oligomer
gaacagcaaaagaagacaa

SEQ ID NO: 13720 - RNA, 19 nt, artificial
  Oligomer
agacuuaacugguucauau

SEQ ID NO: 13721 - RNA, 19 nt, artificial
  Oligomer
gcaguagucaaggaggaaa

SEQ ID NO: 13722 - RNA, 19 nt, artificial
  Oligomer
ucuucagcaagcugugaaa

SEQ ID NO: 13723 - RNA, 19 nt, artificial
  Oligomer
caauaacaggucaacuuca

SEQ ID NO: 13724 - RNA, 19 nt, artificial
  Oligomer
ggaaguagaauuuguccaa

SEQ ID NO: 13725 - RNA, 19 nt, artificial
  Oligomer
gauugagaagggaaagugu

SEQ ID NO: 13726 - RNA, 19 nt, artificial
  Oligomer
auauauggcccgaguacaa

SEQ ID NO: 13727 - RNA, 19 nt, artificial
  Oligomer
uguugaagagcuggcacaa

SEQ ID NO: 13728 - RNA, 19 nt, artificial
  Oligomer
uacuaagggaagaaacaaa

SEQ ID NO: 13729 - RNA, 19 nt, artificial
  Oligomer
uccuaaugucagaguagaa

SEQ ID NO: 13730 - RNA, 19 nt, artificial
  Oligomer
uggaauuuuucuucagcaa

SEQ ID NO: 13731 - RNA, 19 nt, artificial
  Oligomer
agaacaucucagaagugga

SEQ ID NO: 13732 - RNA, 19 nt, artificial
  Oligomer
ccugggccauuaccuuaau

SEQ ID NO: 13733 - RNA, 19 nt, artificial
  Oligomer
cuguuagcagcaaacugga

SEQ ID NO: 13734 - RNA, 19 nt, artificial
  Oligomer
cugguuggaaaauggagaa

SEQ ID NO: 13735 - RNA, 19 nt, artificial
  Oligomer
uguuguucugaaguaugaa

SEQ ID NO: 13736 - RNA, 19 nt, artificial
  Oligomer
agggaacaucaccauccaa

SEQ ID NO: 13737 - RNA, 19 nt, artificial
  Oligomer
agcaauacuaagggaagaa

SEQ ID NO: 13738 - RNA, 19 nt, artificial
  Oligomer
gcagagaacuggaaagaca

SEQ ID NO: 13739 - RNA, 19 nt, artificial
  Oligomer
aacucaaacccucuguaaa

SEQ ID NO: 13740 - RNA, 19 nt, artificial
  Oligomer
agucaaggaggaaagggau

SEQ ID NO: 13741 - RNA, 19 nt, artificial
  Oligomer
guuugacuguggccuguua

SEQ ID NO: 13742 - RNA, 19 nt, artificial
  Oligomer
ccucagauggacaagauua

SEQ ID NO: 13743 - RNA, 19 nt, artificial
  Oligomer
accuucaacuggaauacaa

SEQ ID NO: 13744 - RNA, 19 nt, artificial
  Oligomer
guugaagagcuggcacaaa

SEQ ID NO: 13745 - RNA, 19 nt, artificial
  Oligomer
cagggaacaucaccaucca

SEQ ID NO: 13746 - RNA, 19 nt, artificial
  Oligomer
agggaagaaacaaaguuga

SEQ ID NO: 13747 - RNA, 19 nt, artificial
  Oligomer
cacuaugcugcuucacaaa

SEQ ID NO: 13748 - RNA, 19 nt, artificial
  Oligomer
acaauucacuagaccagaa

SEQ ID NO: 13749 - RNA, 19 nt, artificial
  Oligomer
caguaagcuaucuucaaau

SEQ ID NO: 13750 - RNA, 19 nt, artificial
  Oligomer
cguuguuuacaguguaugu

SEQ ID NO: 13751 - RNA, 19 nt, artificial
  Oligomer
cucuauugcugcucucuca

SEQ ID NO: 13752 - RNA, 19 nt, artificial
  Oligomer
cugugaaacuaaauccaca

SEQ ID NO: 13753 - RNA, 19 nt, artificial
  Oligomer
ugauaugcugccugaccua

SEQ ID NO: 13754 - RNA, 19 nt, artificial
  Oligomer
agagcauuuuccugauaac

SEQ ID NO: 13755 - RNA, 19 nt, artificial
  Oligomer
gaaacaaaguugaaccguu

SEQ ID NO: 13756 - RNA, 19 nt, artificial
  Oligomer
ucacuaugcugcuucacaa

SEQ ID NO: 13757 - RNA, 19 nt, artificial
  Oligomer
gggauuuaaagccuuuaga

SEQ ID NO: 13758 - RNA, 19 nt, artificial
  Oligomer
guugaacagcaaaagaaga

SEQ ID NO: 13759 - RNA, 19 nt, artificial
  Oligomer
cagaaguggacgcaacuua

SEQ ID NO: 13760 - RNA, 19 nt, artificial
  Oligomer
cagagaacuggaaagacau

SEQ ID NO: 13761 - RNA, 19 nt, artificial
  Oligomer
guucauauuggacugauaa

SEQ ID NO: 13762 - RNA, 19 nt, artificial
  Oligomer
caauguaaugcauaggaag

SEQ ID NO: 13763 - RNA, 19 nt, artificial
  Oligomer
cuguuaacugguauauaca

SEQ ID NO: 13764 - RNA, 19 nt, artificial
  Oligomer
ugagagauugagaagggaa

SEQ ID NO: 13765 - RNA, 19 nt, artificial
  Oligomer
ggcugaagugacguuauca

SEQ ID NO: 13766 - RNA, 19 nt, artificial
  Oligomer
aggucuaacaccaacauaa

SEQ ID NO: 13767 - RNA, 19 nt, artificial
  Oligomer
gcaaaagaagacaacauuu

SEQ ID NO: 13768 - RNA, 19 nt, artificial
  Oligomer
ucaugacuccuuucucuaa

SEQ ID NO: 13769 - RNA, 19 nt, artificial
  Oligomer
aaugauuuagguacgucaa

SEQ ID NO: 13770 - RNA, 19 nt, artificial
  Oligomer
acagcagaaaggagaacua

SEQ ID NO: 13771 - RNA, 19 nt, artificial
  Oligomer
gcaugaacaucuuuaggag

SEQ ID NO: 13772 - RNA, 19 nt, artificial
  Oligomer
aggaggaaugagagauuga

SEQ ID NO: 13773 - RNA, 19 nt, artificial
  Oligomer
acuggauuucaauaugaca

SEQ ID NO: 13774 - RNA, 19 nt, artificial
  Oligomer
gagaagaauuaaaugccau

SEQ ID NO: 13775 - RNA, 19 nt, artificial
  Oligomer
caccucuccugguuggaaa

SEQ ID NO: 13776 - RNA, 19 nt, artificial
  Oligomer
guuguucugaaguaugaaa

SEQ ID NO: 13777 - RNA, 19 nt, artificial
  Oligomer
gguccaaauuguuggcuuu

SEQ ID NO: 13778 - RNA, 19 nt, artificial
  Oligomer
gaagacaacauuucucaaa

SEQ ID NO: 13779 - RNA, 19 nt, artificial
  Oligomer
gggauaaucacauuaucau

SEQ ID NO: 13780 - RNA, 19 nt, artificial
  Oligomer
caucagcagagaacuggaa

SEQ ID NO: 13781 - RNA, 19 nt, artificial
  Oligomer
acaucagcagagaacugga

SEQ ID NO: 13782 - RNA, 19 nt, artificial
  Oligomer
cuaagguaguaacuuucca

SEQ ID NO: 13783 - RNA, 19 nt, artificial
  Oligomer
guauaacaguguccgcaga

SEQ ID NO: 13784 - RNA, 19 nt, artificial
  Oligomer
ccauuaccuuaaucucagu

SEQ ID NO: 13785 - RNA, 19 nt, artificial
  Oligomer
ccuucaacuggaauacaac

SEQ ID NO: 13786 - RNA, 19 nt, artificial
  Oligomer
gacuguaagaagagaacau

SEQ ID NO: 13787 - RNA, 19 nt, artificial
  Oligomer
gcuuuauagacuguaagaa

SEQ ID NO: 13788 - RNA, 19 nt, artificial
  Oligomer
agaaggauaauuugcucaa

SEQ ID NO: 13789 - RNA, 19 nt, artificial
  Oligomer
acuggcaaaaggagaagaa

SEQ ID NO: 13790 - RNA, 19 nt, artificial
  Oligomer
caguugugaugacuauguu

SEQ ID NO: 13791 - RNA, 19 nt, artificial
  Oligomer
gcugggauuuaaagccuuu

SEQ ID NO: 13792 - RNA, 19 nt, artificial
  Oligomer
aguugaacagcaaaagaag

SEQ ID NO: 13793 - RNA, 19 nt, artificial
  Oligomer
aucuggaguugaacagcaa

SEQ ID NO: 13794 - RNA, 19 nt, artificial
  Oligomer
gcuaucuucaaaugucuaa

SEQ ID NO: 13795 - RNA, 19 nt, artificial
  Oligomer
gaaagggauaguccaaaga

SEQ ID NO: 13796 - RNA, 19 nt, artificial
  Oligomer
agaugcagagagagaagga

SEQ ID NO: 13797 - RNA, 19 nt, artificial
  Oligomer
agaagagaacaucucagaa

SEQ ID NO: 13798 - RNA, 19 nt, artificial
  Oligomer
ccugauaaccugcucccau

SEQ ID NO: 13799 - RNA, 19 nt, artificial
  Oligomer
caacacaacaguuucccaa

SEQ ID NO: 13800 - RNA, 19 nt, artificial
  Oligomer
cuaguauaucugacuuuga

SEQ ID NO: 13801 - RNA, 19 nt, artificial
  Oligomer
cgaguguguuguucugaag

SEQ ID NO: 13802 - RNA, 19 nt, artificial
  Oligomer
ggaccaucuuugauaucac

SEQ ID NO: 13803 - RNA, 19 nt, artificial
  Oligomer
ggaacaucaccauccaagu

SEQ ID NO: 13804 - RNA, 19 nt, artificial
  Oligomer
uggagggucuucuacguga

SEQ ID NO: 13805 - RNA, 19 nt, artificial
  Oligomer
agggcagagaggucuaaca

SEQ ID NO: 13806 - RNA, 19 nt, artificial
  Oligomer
ggcuuuagcuaccucacua

SEQ ID NO: 13807 - RNA, 19 nt, artificial
  Oligomer
agaagacaacauuucucaa

SEQ ID NO: 13808 - RNA, 19 nt, artificial
  Oligomer
cagcaaaagaagacaacau

SEQ ID NO: 13809 - RNA, 19 nt, artificial
  Oligomer
aucucuguguguuuuguaa

SEQ ID NO: 13810 - RNA, 19 nt, artificial
  Oligomer
augacuccuuucucuaaaa

SEQ ID NO: 13811 - RNA, 19 nt, artificial
  Oligomer
cuuuggagacccaggaaca

SEQ ID NO: 13812 - RNA, 19 nt, artificial
  Oligomer
agcaguagucaaggaggaa

SEQ ID NO: 13813 - RNA, 19 nt, artificial
  Oligomer
cauguaagacgaaugauuu

SEQ ID NO: 13814 - RNA, 19 nt, artificial
  Oligomer
uuaggagacuaauggaaau

SEQ ID NO: 13815 - RNA, 19 nt, artificial
  Oligomer
gcaagcugugaaacuaaau

SEQ ID NO: 13816 - RNA, 19 nt, artificial
  Oligomer
aggucaacuucagagacua

SEQ ID NO: 13817 - RNA, 19 nt, artificial
  Oligomer
agagaauaccaguguuauu

SEQ ID NO: 13818 - RNA, 19 nt, artificial
  Oligomer
uggaagggacuuuagagaa

SEQ ID NO: 13819 - RNA, 19 nt, artificial
  Oligomer
gaauucuugaguucuggaa

SEQ ID NO: 13820 - RNA, 19 nt, artificial
  Oligomer
cucuggugaccuugaucaa

SEQ ID NO: 13821 - RNA, 19 nt, artificial
  Oligomer
cuggauuucaauaugacaa

SEQ ID NO: 13822 - RNA, 19 nt, artificial
  Oligomer
guguguuguucugaaguau

SEQ ID NO: 13823 - RNA, 19 nt, artificial
  Oligomer
cagauacuuugucagcaau

SEQ ID NO: 13824 - RNA, 19 nt, artificial
  Oligomer
gaggucuaacaccaacaua

SEQ ID NO: 13825 - RNA, 19 nt, artificial
  Oligomer
accucacuaugcugcuuca

SEQ ID NO: 13826 - RNA, 19 nt, artificial
  Oligomer
gaaaaucuggaguugaaca

SEQ ID NO: 13827 - RNA, 19 nt, artificial
  Oligomer
ggucuuucugacaucagca

SEQ ID NO: 13828 - RNA, 19 nt, artificial
  Oligomer
caguguauguacuaagcag

SEQ ID NO: 13829 - RNA, 19 nt, artificial
  Oligomer
ggaaagggauaguccaaag

SEQ ID NO: 13830 - RNA, 19 nt, artificial
  Oligomer
agaaaggagaacuauccaa

SEQ ID NO: 13831 - RNA, 19 nt, artificial
  Oligomer
cagcagaaaggagaacuau

SEQ ID NO: 13832 - RNA, 19 nt, artificial
  Oligomer
guguuuacccaguauucca

SEQ ID NO: 13833 - RNA, 19 nt, artificial
  Oligomer
aggaaguauggcaugaaca

SEQ ID NO: 13834 - RNA, 19 nt, artificial
  Oligomer
gauuuuaugcugcuguuua

SEQ ID NO: 13835 - RNA, 19 nt, artificial
  Oligomer
cuaaugucagaguagaaga

SEQ ID NO: 13836 - RNA, 19 nt, artificial
  Oligomer
caaagugcugcuggaagua

SEQ ID NO: 13837 - RNA, 19 nt, artificial
  Oligomer
cuggaagggacuuuagaga

SEQ ID NO: 13838 - RNA, 19 nt, artificial
  Oligomer
aguucuggaagggacuuua

SEQ ID NO: 13839 - RNA, 19 nt, artificial
  Oligomer
cagagagagaaggaggaau

SEQ ID NO: 13840 - RNA, 19 nt, artificial
  Oligomer
ugcagagagagaaggagga

SEQ ID NO: 13841 - RNA, 19 nt, artificial
  Oligomer
cuggcugaagugacguuau

SEQ ID NO: 13842 - RNA, 19 nt, artificial
  Oligomer
agaaccggaccaucuuuga

SEQ ID NO: 13843 - RNA, 19 nt, artificial
  Oligomer
cugaagauuacccaaagaa

SEQ ID NO: 13844 - RNA, 19 nt, artificial
  Oligomer
agaagaaaauggugcugac

SEQ ID NO: 13845 - RNA, 19 nt, artificial
  Oligomer
guguuauccacgugaccaa

SEQ ID NO: 13846 - RNA, 19 nt, artificial
  Oligomer
uguuggcuuucacuuuuga

SEQ ID NO: 13847 - RNA, 19 nt, artificial
  Oligomer
aauacuaagggaagaaaca

SEQ ID NO: 13848 - RNA, 19 nt, artificial
  Oligomer
guaacaguugugaugacua

SEQ ID NO: 13849 - RNA, 19 nt, artificial
  Oligomer
ucuggaguugaacagcaaa

SEQ ID NO: 13850 - RNA, 19 nt, artificial
  Oligomer
acuuaagcugggauaauca

SEQ ID NO: 13851 - RNA, 19 nt, artificial
  Oligomer
cacaauucacuagaccaga

SEQ ID NO: 13852 - RNA, 19 nt, artificial
  Oligomer
acuggaaagacauagccaa

SEQ ID NO: 13853 - RNA, 19 nt, artificial
  Oligomer
agcaguaagcuaucuucaa

SEQ ID NO: 13854 - RNA, 19 nt, artificial
  Oligomer
cuauccaaaacuaauuucc

SEQ ID NO: 13855 - RNA, 19 nt, artificial
  Oligomer
agguacagcagaaaggaga

SEQ ID NO: 13856 - RNA, 19 nt, artificial
  Oligomer
ccaugagguacagcagaaa

SEQ ID NO: 13857 - RNA, 19 nt, artificial
  Oligomer
cccaguauuccauuuuuuu

SEQ ID NO: 13858 - RNA, 19 nt, artificial
  Oligomer
caugaacaucuuuaggaga

SEQ ID NO: 13859 - RNA, 19 nt, artificial
  Oligomer
guggaauuuuucuucagca

SEQ ID NO: 13860 - RNA, 19 nt, artificial
  Oligomer
ccagaacccagauuuccua

SEQ ID NO: 13861 - RNA, 19 nt, artificial
  Oligomer
gaggaauauggugggcaca

SEQ ID NO: 13862 - RNA, 19 nt, artificial
  Oligomer
caauugaccucuucuggga

SEQ ID NO: 13863 - RNA, 19 nt, artificial
  Oligomer
ugaauauauggcccgagua

SEQ ID NO: 13864 - RNA, 19 nt, artificial
  Oligomer
ucuacuggcaaaaggagaa

SEQ ID NO: 13865 - RNA, 19 nt, artificial
  Oligomer
ggucuuucucacuucuguu

SEQ ID NO: 13866 - RNA, 19 nt, artificial
  Oligomer
ccucuguaaaguaacagaa

SEQ ID NO: 13867 - RNA, 19 nt, artificial
  Oligomer
cuacgugagcaauuggauu

SEQ ID NO: 13868 - RNA, 19 nt, artificial
  Oligomer
gagaggucuaacaccaaca

SEQ ID NO: 13869 - RNA, 19 nt, artificial
  Oligomer
gcugggauaaucacauuau

SEQ ID NO: 13870 - RNA, 19 nt, artificial
  Oligomer
cgcaacuuaagcugggaua

SEQ ID NO: 13871 - RNA, 19 nt, artificial
  Oligomer
cuaaaacugccuuccacaa

SEQ ID NO: 13872 - RNA, 19 nt, artificial
  Oligomer
cgucaaagcaguagucaag

SEQ ID NO: 13873 - RNA, 19 nt, artificial
  Oligomer
augauuuagguacgucaaa

SEQ ID NO: 13874 - RNA, 19 nt, artificial
  Oligomer
uaugcugcuguuuacaaaa

SEQ ID NO: 13875 - RNA, 19 nt, artificial
  Oligomer
gucagaguagaagauuuua

SEQ ID NO: 13876 - RNA, 19 nt, artificial
  Oligomer
gggaggugacccgaauuau

SEQ ID NO: 13877 - RNA, 19 nt, artificial
  Oligomer
guguuuugaaaugcagaau

SEQ ID NO: 13878 - RNA, 19 nt, artificial
  Oligomer
uauggugggcacagaagua

SEQ ID NO: 13879 - RNA, 19 nt, artificial
  Oligomer
gacauuuaagagugaauca

SEQ ID NO: 13880 - RNA, 19 nt, artificial
  Oligomer
gcugacuucccuacaccua

SEQ ID NO: 13881 - RNA, 19 nt, artificial
  Oligomer
aagugacguuaucagucaa

SEQ ID NO: 13882 - RNA, 19 nt, artificial
  Oligomer
cacuaauaaccucuccauu

SEQ ID NO: 13883 - RNA, 19 nt, artificial
  Oligomer
gcagagaggucuaacacca

SEQ ID NO: 13884 - RNA, 19 nt, artificial
  Oligomer
gcaacuuaagcugggauaa

SEQ ID NO: 13885 - RNA, 19 nt, artificial
  Oligomer
gcuuuuucuccuugguauu

SEQ ID NO: 13886 - RNA, 19 nt, artificial
  Oligomer
caaagacuuaacugguuca

SEQ ID NO: 13887 - RNA, 19 nt, artificial
  Oligomer
gucaaggaggaaagggaua

SEQ ID NO: 13888 - RNA, 19 nt, artificial
  Oligomer
uagucaaggaggaaaggga

SEQ ID NO: 13889 - RNA, 19 nt, artificial
  Oligomer
aagcaguagucaaggagga

SEQ ID NO: 13890 - RNA, 19 nt, artificial
  Oligomer
aauuuccucugacauguaa

SEQ ID NO: 13891 - RNA, 19 nt, artificial
  Oligomer
cuuuaggagacuaauggaa

SEQ ID NO: 13892 - RNA, 19 nt, artificial
  Oligomer
acaucuuuaggagacuaau

SEQ ID NO: 13893 - RNA, 19 nt, artificial
  Oligomer
acauauauaugucaggcaa

SEQ ID NO: 13894 - RNA, 19 nt, artificial
  Oligomer
gacuuuagagaauaccagu

SEQ ID NO: 13895 - RNA, 19 nt, artificial
  Oligomer
aagguguuuugaaaugcag

SEQ ID NO: 13896 - RNA, 19 nt, artificial
  Oligomer
gugucuagaggaauauggu

SEQ ID NO: 13897 - RNA, 19 nt, artificial
  Oligomer
ggaggaaugagagauugag

SEQ ID NO: 13898 - RNA, 19 nt, artificial
  Oligomer
caagaugcagagagagaag

SEQ ID NO: 13899 - RNA, 19 nt, artificial
  Oligomer
guugaaccguuucuuuaau

SEQ ID NO: 13900 - RNA, 19 nt, artificial
  Oligomer
ugucagcaauacuaaggga

SEQ ID NO: 13901 - RNA, 19 nt, artificial
  Oligomer
cuagcaguguuucccguau

SEQ ID NO: 13902 - RNA, 19 nt, artificial
  Oligomer
gguauuucugggucuuucu

SEQ ID NO: 13903 - RNA, 19 nt, artificial
  Oligomer
ccauagggccuccuuagau

SEQ ID NO: 13904 - RNA, 19 nt, artificial
  Oligomer
uuaacugguucauauugga

SEQ ID NO: 13905 - RNA, 19 nt, artificial
  Oligomer
gacuuaacugguucauauu

SEQ ID NO: 13906 - RNA, 19 nt, artificial
  Oligomer
ccuguuaacugguauauac

SEQ ID NO: 13907 - RNA, 19 nt, artificial
  Oligomer
ggacuuuagagaauaccag

SEQ ID NO: 13908 - RNA, 19 nt, artificial
  Oligomer
gaucaagguguuuugaaau

SEQ ID NO: 13909 - RNA, 19 nt, artificial
  Oligomer
ggugcuucuucacuucagu

SEQ ID NO: 13910 - RNA, 19 nt, artificial
  Oligomer
aaaguguacgcccuguaua

SEQ ID NO: 13911 - RNA, 19 nt, artificial
  Oligomer
caagcaagagcauuuuccu

SEQ ID NO: 13912 - RNA, 19 nt, artificial
  Oligomer
uccugaaacugagcucuau

SEQ ID NO: 13913 - RNA, 19 nt, artificial
  Oligomer
aucugacuuugaaauucca

SEQ ID NO: 13914 - RNA, 19 nt, artificial
  Oligomer
aguguguuguucugaagua

SEQ ID NO: 13915 - RNA, 19 nt, artificial
  Oligomer
accggaccaucuuugauau

SEQ ID NO: 13916 - RNA, 19 nt, artificial
  Oligomer
ccuguauucuacagcagau

SEQ ID NO: 13917 - RNA, 19 nt, artificial
  Oligomer
accuugcuccuguguaaaa

SEQ ID NO: 13918 - RNA, 19 nt, artificial
  Oligomer
cugggauuuaaagccuuua

SEQ ID NO: 13919 - RNA, 19 nt, artificial
  Oligomer
ugacauguaagacgaauga

SEQ ID NO: 13920 - RNA, 19 nt, artificial
  Oligomer
aaacuaauuuccucugaca

SEQ ID NO: 13921 - RNA, 19 nt, artificial
  Oligomer
uacaaaagcccaauguaau

SEQ ID NO: 13922 - RNA, 19 nt, artificial
  Oligomer
cugauuuccuaaugucaga

SEQ ID NO: 13923 - RNA, 19 nt, artificial
  Oligomer
gccuguuaacugguauaua

SEQ ID NO: 13924 - RNA, 19 nt, artificial
  Oligomer
guguacgcccuguauaaca

SEQ ID NO: 13925 - RNA, 19 nt, artificial
  Oligomer
cauccugggccauuaccuu

SEQ ID NO: 13926 - RNA, 19 nt, artificial
  Oligomer
cuggaauacaaccaagcaa

SEQ ID NO: 13927 - RNA, 19 nt, artificial
  Oligomer
uggacauuuaagagugaau

SEQ ID NO: 13928 - RNA, 19 nt, artificial
  Oligomer
agcaaacuggauuucaaua

SEQ ID NO: 13929 - RNA, 19 nt, artificial
  Oligomer
ugcuuuauagacuguaaga

SEQ ID NO: 13930 - RNA, 19 nt, artificial
  Oligomer
ccuggcugaagugacguua

SEQ ID NO: 13931 - RNA, 19 nt, artificial
  Oligomer
ugaagagcuggcacaaacu

SEQ ID NO: 13932 - RNA, 19 nt, artificial
  Oligomer
uggucacaauguuucuguu

SEQ ID NO: 13933 - RNA, 19 nt, artificial
  Oligomer
aaguugaaccguuucuuua

SEQ ID NO: 13934 - RNA, 19 nt, artificial
  Oligomer
acuuugucagcaauacuaa

SEQ ID NO: 13935 - RNA, 19 nt, artificial
  Oligomer
acagcaaaagaagacaaca

SEQ ID NO: 13936 - RNA, 19 nt, artificial
  Oligomer
gaaguggacgcaacuuaag

SEQ ID NO: 13937 - RNA, 19 nt, artificial
  Oligomer
ucucuguguguuuuguaaa

SEQ ID NO: 13938 - RNA, 19 nt, artificial
  Oligomer
ucuucaaaugucuaaggua

SEQ ID NO: 13939 - RNA, 19 nt, artificial
  Oligomer
agcuaucuucaaaugucua

SEQ ID NO: 13940 - RNA, 19 nt, artificial
  Oligomer
acauguaagacgaaugauu

SEQ ID NO: 13941 - RNA, 19 nt, artificial
  Oligomer
cauaggaaguauggcauga

SEQ ID NO: 13942 - RNA, 19 nt, artificial
  Oligomer
gcugcuggaaguagaauuu

SEQ ID NO: 13943 - RNA, 19 nt, artificial
  Oligomer
aggcaaagugcugcuggaa

SEQ ID NO: 13944 - RNA, 19 nt, artificial
  Oligomer
cccgaauuauaaaggccag

SEQ ID NO: 13945 - RNA, 19 nt, artificial
  Oligomer
ugaccuugaucaagguguu

SEQ ID NO: 13946 - RNA, 19 nt, artificial
  Oligomer
caccuugcccuuuacguau

SEQ ID NO: 13947 - RNA, 19 nt, artificial
  Oligomer
gaacuuccucagauggaca

SEQ ID NO: 13948 - RNA, 19 nt, artificial
  Oligomer
gggcugaaaagaucugaag

SEQ ID NO: 13949 - RNA, 19 nt, artificial
  Oligomer
acagcuucaugugucucau

SEQ ID NO: 13950 - RNA, 19 nt, artificial
  Oligomer
gucaaagcugacuucccua

SEQ ID NO: 13951 - RNA, 19 nt, artificial
  Oligomer
acucgcaucuacuggcaaa

SEQ ID NO: 13952 - RNA, 19 nt, artificial
  Oligomer
cuguugaagagcuggcaca

SEQ ID NO: 13953 - RNA, 19 nt, artificial
  Oligomer
gaaagaaguggcaacgcug

SEQ ID NO: 13954 - RNA, 19 nt, artificial
  Oligomer
cccucuguaaaguaacaga

SEQ ID NO: 13955 - RNA, 19 nt, artificial
  Oligomer
agauacuuugucagcaaua

SEQ ID NO: 13956 - RNA, 19 nt, artificial
  Oligomer
guaauuccuguauucuaca

SEQ ID NO: 13957 - RNA, 19 nt, artificial
  Oligomer
aguugugaugacuauguuu

SEQ ID NO: 13958 - RNA, 19 nt, artificial
  Oligomer
guauugacaggaauacuua

SEQ ID NO: 13959 - RNA, 19 nt, artificial
  Oligomer
aguguuucccguauugaca

SEQ ID NO: 13960 - RNA, 19 nt, artificial
  Oligomer
caguguuucccguauugac

SEQ ID NO: 13961 - RNA, 19 nt, artificial
  Oligomer
gcaguguuucccguauuga

SEQ ID NO: 13962 - RNA, 19 nt, artificial
  Oligomer
caaaccuugcuccugugua

SEQ ID NO: 13963 - RNA, 19 nt, artificial
  Oligomer
cuguguguuuuguaaacau

SEQ ID NO: 13964 - RNA, 19 nt, artificial
  Oligomer
caaaugucuaagguaguaa

SEQ ID NO: 13965 - RNA, 19 nt, artificial
  Oligomer
cccaugagguacagcagaa

SEQ ID NO: 13966 - RNA, 19 nt, artificial
  Oligomer
uuaugcugcuguuuacaaa

SEQ ID NO: 13967 - RNA, 19 nt, artificial
  Oligomer
ggucaacuucagagacuau

SEQ ID NO: 13968 - RNA, 19 nt, artificial
  Oligomer
gaaguagaauuuguccaau

SEQ ID NO: 13969 - RNA, 19 nt, artificial
  Oligomer
agaggaauauggugggcac

SEQ ID NO: 13970 - RNA, 19 nt, artificial
  Oligomer
agagaaggaggaaugagag

SEQ ID NO: 13971 - RNA, 19 nt, artificial
  Oligomer
accucuccugguuggaaaa

SEQ ID NO: 13972 - RNA, 19 nt, artificial
  Oligomer
ucugacuuugaaauuccaa

SEQ ID NO: 13973 - RNA, 19 nt, artificial
  Oligomer
caucugacgagggcacaua

SEQ ID NO: 13974 - RNA, 19 nt, artificial
  Oligomer
acaugaauauauggcccga

SEQ ID NO: 13975 - RNA, 19 nt, artificial
  Oligomer
ccucucugaagauuaccca

SEQ ID NO: 13976 - RNA, 19 nt, artificial
  Oligomer
cacuucuguucagguguua

SEQ ID NO: 13977 - RNA, 19 nt, artificial
  Oligomer
uggucuuacuuggguccaa

SEQ ID NO: 13978 - RNA, 19 nt, artificial
  Oligomer
cauggcuuuagcuaccuca

SEQ ID NO: 13979 - RNA, 19 nt, artificial
  Oligomer
agaccagaaguggacgcaa

SEQ ID NO: 13980 - RNA, 19 nt, artificial
  Oligomer
ugucuaagguaguaacuuu

SEQ ID NO: 13981 - RNA, 19 nt, artificial
  Oligomer
caguagucaaggaggaaag

SEQ ID NO: 13982 - RNA, 19 nt, artificial
  Oligomer
gguacgucaaagcaguagu

SEQ ID NO: 13983 - RNA, 19 nt, artificial
  Oligomer
ccucugacauguaagacga

SEQ ID NO: 13984 - RNA, 19 nt, artificial
  Oligomer
gcuguuuacaaaagcccaa

SEQ ID NO: 13985 - RNA, 19 nt, artificial
  Oligomer
ugaacucaaacccucugua

SEQ ID NO: 13986 - RNA, 19 nt, artificial
  Oligomer
auaacaggucaacuucaga

SEQ ID NO: 13987 - RNA, 19 nt, artificial
  Oligomer
uggccuguuaacugguaua

SEQ ID NO: 13988 - RNA, 19 nt, artificial
  Oligomer
gagaauaccaguguuauua

SEQ ID NO: 13989 - RNA, 19 nt, artificial
  Oligomer
guagcucuggugaccuuga

SEQ ID NO: 13990 - RNA, 19 nt, artificial
  Oligomer
auugagaagggaaagugua

SEQ ID NO: 13991 - RNA, 19 nt, artificial
  Oligomer
gcaagagcauuuuccugau

SEQ ID NO: 13992 - RNA, 19 nt, artificial
  Oligomer
uggaaaauggagaagaauu

SEQ ID NO: 13993 - RNA, 19 nt, artificial
  Oligomer
gguuggaaaauggagaaga

SEQ ID NO: 13994 - RNA, 19 nt, artificial
  Oligomer
cuucccuacaccuaguaua

SEQ ID NO: 13995 - RNA, 19 nt, artificial
  Oligomer
gaagugaaagaaguggcaa

SEQ ID NO: 13996 - RNA, 19 nt, artificial
  Oligomer
uggucuuucucacuucugu

SEQ ID NO: 13997 - RNA, 19 nt, artificial
  Oligomer
gcuggucuuucucacuucu

SEQ ID NO: 13998 - RNA, 19 nt, artificial
  Oligomer
aaguguccauaccucaauu

SEQ ID NO: 13999 - RNA, 19 nt, artificial
  Oligomer
cacuuuugacccuaagcau

SEQ ID NO: 14000 - RNA, 19 nt, artificial
  Oligomer
cuaagggaagaaacaaagu

SEQ ID NO: 14001 - RNA, 19 nt, artificial
  Oligomer
auacuaagggaagaaacaa

SEQ ID NO: 14002 - RNA, 19 nt, artificial
  Oligomer
caauacuaagggaagaaac

SEQ ID NO: 14003 - RNA, 19 nt, artificial
  Oligomer
aucacuggagggucuucua

SEQ ID NO: 14004 - RNA, 19 nt, artificial
  Oligomer
ggucuaacaccaacauaag

SEQ ID NO: 14005 - RNA, 19 nt, artificial
  Oligomer
agcaaaagaagacaacauu

SEQ ID NO: 14006 - RNA, 19 nt, artificial
  Oligomer
guguguuuuguaaacauca

SEQ ID NO: 14007 - RNA, 19 nt, artificial
  Oligomer
gacgcaacuuaagcuggga

SEQ ID NO: 14008 - RNA, 19 nt, artificial
  Oligomer
aagguaguaacuuuccaua

SEQ ID NO: 14009 - RNA, 19 nt, artificial
  Oligomer
guacuaagcaguaagcuau

SEQ ID NO: 14010 - RNA, 19 nt, artificial
  Oligomer
uaugcuaguuugaccucau

SEQ ID NO: 14011 - RNA, 19 nt, artificial
  Oligomer
caaggaggaaagggauagu

SEQ ID NO: 14012 - RNA, 19 nt, artificial
  Oligomer
uagguacgucaaagcagua

SEQ ID NO: 14013 - RNA, 19 nt, artificial
  Oligomer
cagaaaggagaacuaucca

SEQ ID NO: 14014 - RNA, 19 nt, artificial
  Oligomer
ugugaaacuaaauccacaa

SEQ ID NO: 14015 - RNA, 19 nt, artificial
  Oligomer
gaacaucuuuaggagacua

SEQ ID NO: 14016 - RNA, 19 nt, artificial
  Oligomer
cagaguagaagauuuuaug

SEQ ID NO: 14017 - RNA, 19 nt, artificial
  Oligomer
ugcuggaaguagaauuugu

SEQ ID NO: 14018 - RNA, 19 nt, artificial
  Oligomer
gcaaagugcugcuggaagu

SEQ ID NO: 14019 - RNA, 19 nt, artificial
  Oligomer
uucuggaagggacuuuaga

SEQ ID NO: 14020 - RNA, 19 nt, artificial
  Oligomer
augagagauugagaaggga

SEQ ID NO: 14021 - RNA, 19 nt, artificial
  Oligomer
gaauuuuugugauaugcug

SEQ ID NO: 14022 - RNA, 19 nt, artificial
  Oligomer
ggccauuaccuuaaucuca

SEQ ID NO: 14023 - RNA, 19 nt, artificial
  Oligomer
cuguaagaagagaacaucu

SEQ ID NO: 14024 - RNA, 19 nt, artificial
  Oligomer
caugugucucaucaaguau

SEQ ID NO: 14025 - RNA, 19 nt, artificial
  Oligomer
agugacguuaucagucaaa

SEQ ID NO: 14026 - RNA, 19 nt, artificial
  Oligomer
aaguacugagugaacucaa

SEQ ID NO: 14027 - RNA, 19 nt, artificial
  Oligomer
ggguccaaauuguuggcuu

SEQ ID NO: 14028 - RNA, 19 nt, artificial
  Oligomer
ggcugggauuuaaagccuu

SEQ ID NO: 14029 - RNA, 19 nt, artificial
  Oligomer
agcugggauaaucacauua

SEQ ID NO: 14030 - RNA, 19 nt, artificial
  Oligomer
ugccuuccacaauucacua

SEQ ID NO: 14031 - RNA, 19 nt, artificial
  Oligomer
ccaacugcuguucauguua

SEQ ID NO: 14032 - RNA, 19 nt, artificial
  Oligomer
ccuugguauuucugggucu

SEQ ID NO: 14033 - RNA, 19 nt, artificial
  Oligomer
guguauguacuaagcagua

SEQ ID NO: 14034 - RNA, 19 nt, artificial
  Oligomer
uaguuugaccucauuugua

SEQ ID NO: 14035 - RNA, 19 nt, artificial
  Oligomer
uggcuuuaugcuaguuuga

SEQ ID NO: 14036 - RNA, 19 nt, artificial
  Oligomer
uuagguacgucaaagcagu

SEQ ID NO: 14037 - RNA, 19 nt, artificial
  Oligomer
uauugguguuuacccagua

SEQ ID NO: 14038 - RNA, 19 nt, artificial
  Oligomer
ucuuuaggagacuaaugga

SEQ ID NO: 14039 - RNA, 19 nt, artificial
  Oligomer
ggcaugaacaucuuuagga

SEQ ID NO: 14040 - RNA, 19 nt, artificial
  Oligomer
aguauggcaugaacaucuu

SEQ ID NO: 14041 - RNA, 19 nt, artificial
  Oligomer
uuacaaaagcccaauguaa

SEQ ID NO: 14042 - RNA, 19 nt, artificial
  Oligomer
gcucuuucccuuuaucagu

SEQ ID NO: 14043 - RNA, 19 nt, artificial
  Oligomer
agaauucuugaguucugga

SEQ ID NO: 14044 - RNA, 19 nt, artificial
  Oligomer
aauugaccucuucugggaa

SEQ ID NO: 14045 - RNA, 19 nt, artificial
  Oligomer
uccugggccauuaccuuaa

SEQ ID NO: 14046 - RNA, 19 nt, artificial
  Oligomer
gagguuuuccagagccuca

SEQ ID NO: 14047 - RNA, 19 nt, artificial
  Oligomer
gugauuugucauugcuuua

SEQ ID NO: 14048 - RNA, 19 nt, artificial
  Oligomer
ucucaaaugcacaucucau

SEQ ID NO: 14049 - RNA, 19 nt, artificial
  Oligomer
caacauuucucaaaugcac

SEQ ID NO: 14050 - RNA, 19 nt, artificial
  Oligomer
ggccuccuuagaucccuaa

SEQ ID NO: 14051 - RNA, 19 nt, artificial
  Oligomer
ugagaucguuguuuacagu

SEQ ID NO: 14052 - RNA, 19 nt, artificial
  Oligomer
aggaaagggauaguccaaa

SEQ ID NO: 14053 - RNA, 19 nt, artificial
  Oligomer
ugagguacagcagaaagga

SEQ ID NO: 14054 - RNA, 19 nt, artificial
  Oligomer
cauuguguucucuauugcu

SEQ ID NO: 14055 - RNA, 19 nt, artificial
  Oligomer
gacuaucugauuuccuaau

SEQ ID NO: 14056 - RNA, 19 nt, artificial
  Oligomer
gcacagaaguagcucuggu

SEQ ID NO: 14057 - RNA, 19 nt, artificial
  Oligomer
gccauuaccuuaaucucag

SEQ ID NO: 14058 - RNA, 19 nt, artificial
  Oligomer
aucagaccuucaacuggaa

SEQ ID NO: 14059 - RNA, 19 nt, artificial
  Oligomer
gaguguguuguucugaagu

SEQ ID NO: 14060 - RNA, 19 nt, artificial
  Oligomer
ugagcaauuggauugucau

SEQ ID NO: 14061 - RNA, 19 nt, artificial
  Oligomer
uccuguauucuacagcaga

SEQ ID NO: 14062 - RNA, 19 nt, artificial
  Oligomer
cauuuaguaacaguuguga

SEQ ID NO: 14063 - RNA, 19 nt, artificial
  Oligomer
acuggagggucuucuacgu

SEQ ID NO: 14064 - RNA, 19 nt, artificial
  Oligomer
agaggucuaacaccaacau

SEQ ID NO: 14065 - RNA, 19 nt, artificial
  Oligomer
guagggcagagaggucuaa

SEQ ID NO: 14066 - RNA, 19 nt, artificial
  Oligomer
ggauuuaaagccuuuagag

SEQ ID NO: 14067 - RNA, 19 nt, artificial
  Oligomer
gccaacugcuguucauguu

SEQ ID NO: 14068 - RNA, 19 nt, artificial
  Oligomer
aagacuuaacugguucaua

SEQ ID NO: 14069 - RNA, 19 nt, artificial
  Oligomer
cagaacccagauuuccuaa

SEQ ID NO: 14070 - RNA, 19 nt, artificial
  Oligomer
uauaaaggccagcgccaga

SEQ ID NO: 14071 - RNA, 19 nt, artificial
  Oligomer
cccugaaaucaaaggauuu

SEQ ID NO: 14072 - RNA, 19 nt, artificial
  Oligomer
ugaaaugcagaauucuuga

SEQ ID NO: 14073 - RNA, 19 nt, artificial
  Oligomer
gaagugucuagaggaauau

SEQ ID NO: 14074 - RNA, 19 nt, artificial
  Oligomer
gcuuugcaggaagugucua

SEQ ID NO: 14075 - RNA, 19 nt, artificial
  Oligomer
gggaacuuccucagaugga

SEQ ID NO: 14076 - RNA, 19 nt, artificial
  Oligomer
cauuugcaauugaccucuu

SEQ ID NO: 14077 - RNA, 19 nt, artificial
  Oligomer
caccuccauuugcaauuga

SEQ ID NO: 14078 - RNA, 19 nt, artificial
  Oligomer
cccaagaugcagagagaga

SEQ ID NO: 14079 - RNA, 19 nt, artificial
  Oligomer
ggaauuuuugugauaugcu

SEQ ID NO: 14080 - RNA, 19 nt, artificial
  Oligomer
agcauuuuccugauaaccu

SEQ ID NO: 14081 - RNA, 19 nt, artificial
  Oligomer
aaucagaccuucaacugga

SEQ ID NO: 14082 - RNA, 19 nt, artificial
  Oligomer
ucaauaugacaaccaacca

SEQ ID NO: 14083 - RNA, 19 nt, artificial
  Oligomer
uauagacuguaagaagaga

SEQ ID NO: 14084 - RNA, 19 nt, artificial
  Oligomer
cuuuauagacuguaagaag

SEQ ID NO: 14085 - RNA, 19 nt, artificial
  Oligomer
cauugcuuuauagacugua

SEQ ID NO: 14086 - RNA, 19 nt, artificial
  Oligomer
agacgcuuucaagcgggaa

SEQ ID NO: 14087 - RNA, 19 nt, artificial
  Oligomer
gcuguccuguggucacaau

SEQ ID NO: 14088 - RNA, 19 nt, artificial
  Oligomer
ccuaagcaucugaagccau

SEQ ID NO: 14089 - RNA, 19 nt, artificial
  Oligomer
gcaauuggauugucaucag

SEQ ID NO: 14090 - RNA, 19 nt, artificial
  Oligomer
ugugaugacuauguuucua

SEQ ID NO: 14091 - RNA, 19 nt, artificial
  Oligomer
aaccuugcuccuguguaaa

SEQ ID NO: 14092 - RNA, 19 nt, artificial
  Oligomer
gccacauggcugggauuua

SEQ ID NO: 14093 - RNA, 19 nt, artificial
  Oligomer
cucaugacuccuuucucua

SEQ ID NO: 14094 - RNA, 19 nt, artificial
  Oligomer
guauggcaugaacaucuuu

SEQ ID NO: 14095 - RNA, 19 nt, artificial
  Oligomer
auaggaaguauggcaugaa

SEQ ID NO: 14096 - RNA, 19 nt, artificial
  Oligomer
uguaaugcauaggaaguau

SEQ ID NO: 14097 - RNA, 19 nt, artificial
  Oligomer
agcccaauguaaugcauag

SEQ ID NO: 14098 - RNA, 19 nt, artificial
  Oligomer
aagcccaauguaaugcaua

SEQ ID NO: 14099 - RNA, 19 nt, artificial
  Oligomer
aagauuuuaugcugcuguu

SEQ ID NO: 14100 - RNA, 19 nt, artificial
  Oligomer
guggccuguuaacugguau

SEQ ID NO: 14101 - RNA, 19 nt, artificial
  Oligomer
guuauuaaugacaaaggca

SEQ ID NO: 14102 - RNA, 19 nt, artificial
  Oligomer
caguugcuuugcaggaagu

SEQ ID NO: 14103 - RNA, 19 nt, artificial
  Oligomer
cuuaaucucaguaaaugga

SEQ ID NO: 14104 - RNA, 19 nt, artificial
  Oligomer
gaccuucaacuggaauaca

SEQ ID NO: 14105 - RNA, 19 nt, artificial
  Oligomer
agacuguaagaagagaaca

SEQ ID NO: 14106 - RNA, 19 nt, artificial
  Oligomer
gaagugacguuaucaguca

SEQ ID NO: 14107 - RNA, 19 nt, artificial
  Oligomer
gaaguaugaaaaagacgcu

SEQ ID NO: 14108 - RNA, 19 nt, artificial
  Oligomer
aagaaaauggugcugacua

SEQ ID NO: 14109 - RNA, 19 nt, artificial
  Oligomer
aacccucuguaaaguaaca

SEQ ID NO: 14110 - RNA, 19 nt, artificial
  Oligomer
caaaguugaaccguuucuu

SEQ ID NO: 14111 - RNA, 19 nt, artificial
  Oligomer
gucagcaauacuaagggaa

SEQ ID NO: 14112 - RNA, 19 nt, artificial
  Oligomer
cuaacaccaacauaaggua

SEQ ID NO: 14113 - RNA, 19 nt, artificial
  Oligomer
gcuuuagcuaccucacuau

SEQ ID NO: 14114 - RNA, 19 nt, artificial
  Oligomer
uucugcauuucaaaacacc

SEQ ID NO: 14115 - RNA, 19 nt, artificial
  Oligomer
uuaguuuuggauaguucuc

SEQ ID NO: 14116 - RNA, 19 nt, artificial
  Oligomer
uauaauucgggucaccucc

SEQ ID NO: 14117 - RNA, 19 nt, artificial
  Oligomer
uuaaguugcguccacuucu

SEQ ID NO: 14118 - RNA, 19 nt, artificial
  Oligomer
ugcauuucaaaacaccuug

SEQ ID NO: 14119 - RNA, 19 nt, artificial
  Oligomer
uuucccuucucaaucucuc

SEQ ID NO: 14120 - RNA, 19 nt, artificial
  Oligomer
uaucaguccaauaugaacc

SEQ ID NO: 14121 - RNA, 19 nt, artificial
  Oligomer
uauuccucuagacacuucc

SEQ ID NO: 14122 - RNA, 19 nt, artificial
  Oligomer
uucuccuuucugcuguacc

SEQ ID NO: 14123 - RNA, 19 nt, artificial
  Oligomer
ucugcauuucaaaacaccu

SEQ ID NO: 14124 - RNA, 19 nt, artificial
  Oligomer
uucugugcccaccauauuc

SEQ ID NO: 14125 - RNA, 19 nt, artificial
  Oligomer
uuugaagauagcuuacugc

SEQ ID NO: 14126 - RNA, 19 nt, artificial
  Oligomer
uucaacuuuguuucuuccc

SEQ ID NO: 14127 - RNA, 19 nt, artificial
  Oligomer
ucuucccuuaguauugcug

SEQ ID NO: 14128 - RNA, 19 nt, artificial
  Oligomer
uauaguuuuacacaggagc

SEQ ID NO: 14129 - RNA, 19 nt, artificial
  Oligomer
uuucacuuccuuggucacg

SEQ ID NO: 14130 - RNA, 19 nt, artificial
  Oligomer
uuucaaaacaccuugauca

SEQ ID NO: 14131 - RNA, 19 nt, artificial
  Oligomer
uuccucuagacacuuccug

SEQ ID NO: 14132 - RNA, 19 nt, artificial
  Oligomer
uugguguuagaccucucug

SEQ ID NO: 14133 - RNA, 19 nt, artificial
  Oligomer
uucucucucugcaucuugg

SEQ ID NO: 14134 - RNA, 19 nt, artificial
  Oligomer
uggcauuuaauucuucucc

SEQ ID NO: 14135 - RNA, 19 nt, artificial
  Oligomer
uucuucuccauuuuccaac

SEQ ID NO: 14136 - RNA, 19 nt, artificial
  Oligomer
uuuucuucuccuuuugcca

SEQ ID NO: 14137 - RNA, 19 nt, artificial
  Oligomer
auguucaugccauacuucc

SEQ ID NO: 14138 - RNA, 19 nt, artificial
  Oligomer
uuagugauaucaaagaugg

SEQ ID NO: 14139 - RNA, 19 nt, artificial
  Oligomer
uuucuucuccuuuugccag

SEQ ID NO: 14140 - RNA, 19 nt, artificial
  Oligomer
uccuuuugccaguagaugc

SEQ ID NO: 14141 - RNA, 19 nt, artificial
  Oligomer
ucuuuugcuguucaacucc

SEQ ID NO: 14142 - RNA, 19 nt, artificial
  Oligomer
uaggaaaucagauagucuc

SEQ ID NO: 14143 - RNA, 19 nt, artificial
  Oligomer
uucuacuuccagcagcacu

SEQ ID NO: 14144 - RNA, 19 nt, artificial
  Oligomer
ucugugcccaccauauucc

SEQ ID NO: 14145 - RNA, 19 nt, artificial
  Oligomer
uuuaaaucccagccaugug

SEQ ID NO: 14146 - RNA, 19 nt, artificial
  Oligomer
uuauaauucgggucaccuc

SEQ ID NO: 14147 - RNA, 19 nt, artificial
  Oligomer
uugucauuaauaacacugg

SEQ ID NO: 14148 - RNA, 19 nt, artificial
  Oligomer
ucucaaucucucauuccuc

SEQ ID NO: 14149 - RNA, 19 nt, artificial
  Oligomer
cucaguuucaggaucuugg

SEQ ID NO: 14150 - RNA, 19 nt, artificial
  Oligomer
auuuucuucuccuuuugcc

SEQ ID NO: 14151 - RNA, 19 nt, artificial
  Oligomer
uuacacaggagcaagguuu

SEQ ID NO: 14152 - RNA, 19 nt, artificial
  Oligomer
uugacuacugcuuugacgu

SEQ ID NO: 14153 - RNA, 19 nt, artificial
  Oligomer
uuugccugacauauauaug

SEQ ID NO: 14154 - RNA, 19 nt, artificial
  Oligomer
uuugcugcuaacagcauag

SEQ ID NO: 14155 - RNA, 19 nt, artificial
  Oligomer
ugccacuucuuucacuucc

SEQ ID NO: 14156 - RNA, 19 nt, artificial
  Oligomer
uucacuuccuuggucacgu

SEQ ID NO: 14157 - RNA, 19 nt, artificial
  Oligomer
uuaaagaaacgguucaacu

SEQ ID NO: 14158 - RNA, 19 nt, artificial
  Oligomer
uacacuguaaacaacgauc

SEQ ID NO: 14159 - RNA, 19 nt, artificial
  Oligomer
uuggacuaucccuuuccuc

SEQ ID NO: 14160 - RNA, 19 nt, artificial
  Oligomer
uuuuggauaguucuccuuu

SEQ ID NO: 14161 - RNA, 19 nt, artificial
  Oligomer
uuuggauaguucuccuuuc

SEQ ID NO: 14162 - RNA, 19 nt, artificial
  Oligomer
aauauuuccauuagucucc

SEQ ID NO: 14163 - RNA, 19 nt, artificial
  Oligomer
auucucuaaagucccuucc

SEQ ID NO: 14164 - RNA, 19 nt, artificial
  Oligomer
uucagaacaacacacucgu

SEQ ID NO: 14165 - RNA, 19 nt, artificial
  Oligomer
uucuuuugcuguucaacuc

SEQ ID NO: 14166 - RNA, 19 nt, artificial
  Oligomer
uucaacuccagauuuucag

SEQ ID NO: 14167 - RNA, 19 nt, artificial
  Oligomer
uuuacaaaugaggucaaac

SEQ ID NO: 14168 - RNA, 19 nt, artificial
  Oligomer
uggacuaucccuuuccucc

SEQ ID NO: 14169 - RNA, 19 nt, artificial
  Oligomer
uccucuagacacuuccugc

SEQ ID NO: 14170 - RNA, 19 nt, artificial
  Oligomer
uucaggguaagacuccacu

SEQ ID NO: 14171 - RNA, 19 nt, artificial
  Oligomer
cagguuaucaggaaaaugc

SEQ ID NO: 14172 - RNA, 19 nt, artificial
  Oligomer
auagucagcaccauuuucu

SEQ ID NO: 14173 - RNA, 19 nt, artificial
  Oligomer
uuugaguucacucaguacu

SEQ ID NO: 14174 - RNA, 19 nt, artificial
  Oligomer
uuaaaucccagccaugugg

SEQ ID NO: 14175 - RNA, 19 nt, artificial
  Oligomer
uuacaaaugaggucaaacu

SEQ ID NO: 14176 - RNA, 19 nt, artificial
  Oligomer
uuuauaauucgggucaccu

SEQ ID NO: 14177 - RNA, 19 nt, artificial
  Oligomer
ugaagaagcaccuaagagc

SEQ ID NO: 14178 - RNA, 19 nt, artificial
  Oligomer
uacguaaagggcaaggugg

SEQ ID NO: 14179 - RNA, 19 nt, artificial
  Oligomer
uuagggucaaaagugaaag

SEQ ID NO: 14180 - RNA, 19 nt, artificial
  Oligomer
uugcucacguagaagaccc

SEQ ID NO: 14181 - RNA, 19 nt, artificial
  Oligomer
auugaguuaaguauuccug

SEQ ID NO: 14182 - RNA, 19 nt, artificial
  Oligomer
ugacguaccuaaaucauuc

SEQ ID NO: 14183 - RNA, 19 nt, artificial
  Oligomer
ugguauucucuaaaguccc

SEQ ID NO: 14184 - RNA, 19 nt, artificial
  Oligomer
uugaaggucugauucacuc

SEQ ID NO: 14185 - RNA, 19 nt, artificial
  Oligomer
ucuccauuuuccaaccagg

SEQ ID NO: 14186 - RNA, 19 nt, artificial
  Oligomer
uuagcugccaugagaugug

SEQ ID NO: 14187 - RNA, 19 nt, artificial
  Oligomer
uuuagagaaaggagucaug

SEQ ID NO: 14188 - RNA, 19 nt, artificial
  Oligomer
uuaagucuuuggacuaucc

SEQ ID NO: 14189 - RNA, 19 nt, artificial
  Oligomer
uaagucuuuggacuauccc

SEQ ID NO: 14190 - RNA, 19 nt, artificial
  Oligomer
uuuggacccaaguaagacc

SEQ ID NO: 14191 - RNA, 19 nt, artificial
  Oligomer
uuaaagagauuaucagucc

SEQ ID NO: 14192 - RNA, 19 nt, artificial
  Oligomer
uucgucuuacaugucagag

SEQ ID NO: 14193 - RNA, 19 nt, artificial
  Oligomer
ucagaggaaauuaguuuug

SEQ ID NO: 14194 - RNA, 19 nt, artificial
  Oligomer
uaguuuuggauaguucucc

SEQ ID NO: 14195 - RNA, 19 nt, artificial
  Oligomer
ucuacuuccagcagcacuu

SEQ ID NO: 14196 - RNA, 19 nt, artificial
  Oligomer
uucucaaucucucauuccu

SEQ ID NO: 14197 - RNA, 19 nt, artificial
  Oligomer
uugaugagacacaugaagc

SEQ ID NO: 14198 - RNA, 19 nt, artificial
  Oligomer
uuggguaaucuucagagag

SEQ ID NO: 14199 - RNA, 19 nt, artificial
  Oligomer
augaguaacaugaacagca

SEQ ID NO: 14200 - RNA, 19 nt, artificial
  Oligomer
uuccuaugcauuacauugg

SEQ ID NO: 14201 - RNA, 19 nt, artificial
  Oligomer
uuaggaaaucagauagucu

SEQ ID NO: 14202 - RNA, 19 nt, artificial
  Oligomer
uugauuucaggguaagacu

SEQ ID NO: 14203 - RNA, 19 nt, artificial
  Oligomer
uucccaggugcaaaacagg

SEQ ID NO: 14204 - RNA, 19 nt, artificial
  Oligomer
uugaguuaaguauuccugu

SEQ ID NO: 14205 - RNA, 19 nt, artificial
  Oligomer
ugcuaguaccuuauguugg

SEQ ID NO: 14206 - RNA, 19 nt, artificial
  Oligomer
auaccaaggagaaaaagcc

SEQ ID NO: 14207 - RNA, 19 nt, artificial
  Oligomer
uuacagaggguuugaguuc

SEQ ID NO: 14208 - RNA, 19 nt, artificial
  Oligomer
uuaguuucacagcuugcug

SEQ ID NO: 14209 - RNA, 19 nt, artificial
  Oligomer
uauucucuaaagucccuuc

SEQ ID NO: 14210 - RNA, 19 nt, artificial
  Oligomer
uuucaggguaagacuccac

SEQ ID NO: 14211 - RNA, 19 nt, artificial
  Oligomer
uugcaaauggaggugggac

SEQ ID NO: 14212 - RNA, 19 nt, artificial
  Oligomer
uugagguauggacacuugg

SEQ ID NO: 14213 - RNA, 19 nt, artificial
  Oligomer
uuucuucccuuaguauugc

SEQ ID NO: 14214 - RNA, 19 nt, artificial
  Oligomer
uugcugacaaaguaucugc

SEQ ID NO: 14215 - RNA, 19 nt, artificial
  Oligomer
uuuugcuguucaacuccag

SEQ ID NO: 14216 - RNA, 19 nt, artificial
  Oligomer
uaugucuuuccaguucucu

SEQ ID NO: 14217 - RNA, 19 nt, artificial
  Oligomer
ucagcuuugacugauaacg

SEQ ID NO: 14218 - RNA, 19 nt, artificial
  Oligomer
uuacuuuacagaggguuug

SEQ ID NO: 14219 - RNA, 19 nt, artificial
  Oligomer
uugucuucuuuugcuguuc

SEQ ID NO: 14220 - RNA, 19 nt, artificial
  Oligomer
auaugaaccaguuaagucu

SEQ ID NO: 14221 - RNA, 19 nt, artificial
  Oligomer
uuuccuccuugacuacugc

SEQ ID NO: 14222 - RNA, 19 nt, artificial
  Oligomer
uuucacagcuugcugaaga

SEQ ID NO: 14223 - RNA, 19 nt, artificial
  Oligomer
ugaaguugaccuguuauug

SEQ ID NO: 14224 - RNA, 19 nt, artificial
  Oligomer
uuggacaaauucuacuucc

SEQ ID NO: 14225 - RNA, 19 nt, artificial
  Oligomer
acacuuucccuucucaauc

SEQ ID NO: 14226 - RNA, 19 nt, artificial
  Oligomer
uuguacucgggccauauau

SEQ ID NO: 14227 - RNA, 19 nt, artificial
  Oligomer
uugugccagcucuucaaca

SEQ ID NO: 14228 - RNA, 19 nt, artificial
  Oligomer
uuuguuucuucccuuagua

SEQ ID NO: 14229 - RNA, 19 nt, artificial
  Oligomer
uucuacucugacauuagga

SEQ ID NO: 14230 - RNA, 19 nt, artificial
  Oligomer
uugcugaagaaaaauucca

SEQ ID NO: 14231 - RNA, 19 nt, artificial
  Oligomer
uccacuucugagauguucu

SEQ ID NO: 14232 - RNA, 19 nt, artificial
  Oligomer
auuaagguaauggcccagg

SEQ ID NO: 14233 - RNA, 19 nt, artificial
  Oligomer
uccaguuugcugcuaacag

SEQ ID NO: 14234 - RNA, 19 nt, artificial
  Oligomer
uucuccauuuuccaaccag

SEQ ID NO: 14235 - RNA, 19 nt, artificial
  Oligomer
uucauacuucagaacaaca

SEQ ID NO: 14236 - RNA, 19 nt, artificial
  Oligomer
uuggauggugauguucccu

SEQ ID NO: 14237 - RNA, 19 nt, artificial
  Oligomer
uucuucccuuaguauugcu

SEQ ID NO: 14238 - RNA, 19 nt, artificial
  Oligomer
ugucuuuccaguucucugc

SEQ ID NO: 14239 - RNA, 19 nt, artificial
  Oligomer
uuuacagaggguuugaguu

SEQ ID NO: 14240 - RNA, 19 nt, artificial
  Oligomer
aucccuuuccuccuugacu

SEQ ID NO: 14241 - RNA, 19 nt, artificial
  Oligomer
uaacaggccacagucaaac

SEQ ID NO: 14242 - RNA, 19 nt, artificial
  Oligomer
uaaucuuguccaucugagg

SEQ ID NO: 14243 - RNA, 19 nt, artificial
  Oligomer
uuguauuccaguugaaggu

SEQ ID NO: 14244 - RNA, 19 nt, artificial
  Oligomer
uuugugccagcucuucaac

SEQ ID NO: 14245 - RNA, 19 nt, artificial
  Oligomer
uggauggugauguucccug

SEQ ID NO: 14246 - RNA, 19 nt, artificial
  Oligomer
ucaacuuuguuucuucccu

SEQ ID NO: 14247 - RNA, 19 nt, artificial
  Oligomer
uuugugaagcagcauagug

SEQ ID NO: 14248 - RNA, 19 nt, artificial
  Oligomer
uucuggucuagugaauugu

SEQ ID NO: 14249 - RNA, 19 nt, artificial
  Oligomer
auuugaagauagcuuacug

SEQ ID NO: 14250 - RNA, 19 nt, artificial
  Oligomer
acauacacuguaaacaacg

SEQ ID NO: 14251 - RNA, 19 nt, artificial
  Oligomer
ugagagagcagcaauagag

SEQ ID NO: 14252 - RNA, 19 nt, artificial
  Oligomer
uguggauuuaguuucacag

SEQ ID NO: 14253 - RNA, 19 nt, artificial
  Oligomer
uaggucaggcagcauauca

SEQ ID NO: 14254 - RNA, 19 nt, artificial
  Oligomer
guuaucaggaaaaugcucu

SEQ ID NO: 14255 - RNA, 19 nt, artificial
  Oligomer
aacgguucaacuuuguuuc

SEQ ID NO: 14256 - RNA, 19 nt, artificial
  Oligomer
uugugaagcagcauaguga

SEQ ID NO: 14257 - RNA, 19 nt, artificial
  Oligomer
ucuaaaggcuuuaaauccc

SEQ ID NO: 14258 - RNA, 19 nt, artificial
  Oligomer
ucuucuuuugcuguucaac

SEQ ID NO: 14259 - RNA, 19 nt, artificial
  Oligomer
uaaguugcguccacuucug

SEQ ID NO: 14260 - RNA, 19 nt, artificial
  Oligomer
augucuuuccaguucucug

SEQ ID NO: 14261 - RNA, 19 nt, artificial
  Oligomer
uuaucaguccaauaugaac

SEQ ID NO: 14262 - RNA, 19 nt, artificial
  Oligomer
cuuccuaugcauuacauug

SEQ ID NO: 14263 - RNA, 19 nt, artificial
  Oligomer
uguauauaccaguuaacag

SEQ ID NO: 14264 - RNA, 19 nt, artificial
  Oligomer
uucccuucucaaucucuca

SEQ ID NO: 14265 - RNA, 19 nt, artificial
  Oligomer
ugauaacgucacuucagcc

SEQ ID NO: 14266 - RNA, 19 nt, artificial
  Oligomer
uuauguugguguuagaccu

SEQ ID NO: 14267 - RNA, 19 nt, artificial
  Oligomer
aaauguugucuucuuuugc

SEQ ID NO: 14268 - RNA, 19 nt, artificial
  Oligomer
uuagagaaaggagucauga

SEQ ID NO: 14269 - RNA, 19 nt, artificial
  Oligomer
uugacguaccuaaaucauu

SEQ ID NO: 14270 - RNA, 19 nt, artificial
  Oligomer
uaguucuccuuucugcugu

SEQ ID NO: 14271 - RNA, 19 nt, artificial
  Oligomer
cuccuaaagauguucaugc

SEQ ID NO: 14272 - RNA, 19 nt, artificial
  Oligomer
ucaaucucucauuccuccu

SEQ ID NO: 14273 - RNA, 19 nt, artificial
  Oligomer
ugucauauugaaauccagu

SEQ ID NO: 14274 - RNA, 19 nt, artificial
  Oligomer
auggcauuuaauucuucuc

SEQ ID NO: 14275 - RNA, 19 nt, artificial
  Oligomer
uuuccaaccaggagaggug

SEQ ID NO: 14276 - RNA, 19 nt, artificial
  Oligomer
uuucauacuucagaacaac

SEQ ID NO: 14277 - RNA, 19 nt, artificial
  Oligomer
aaagccaacaauuuggacc

SEQ ID NO: 14278 - RNA, 19 nt, artificial
  Oligomer
uuugagaaauguugucuuc

SEQ ID NO: 14279 - RNA, 19 nt, artificial
  Oligomer
augauaaugugauuauccc

SEQ ID NO: 14280 - RNA, 19 nt, artificial
  Oligomer
uuccaguucucugcugaug

SEQ ID NO: 14281 - RNA, 19 nt, artificial
  Oligomer
uccaguucucugcugaugu

SEQ ID NO: 14282 - RNA, 19 nt, artificial
  Oligomer
uggaaaguuacuaccuuag

SEQ ID NO: 14283 - RNA, 19 nt, artificial
  Oligomer
ucugcggacacuguuauac

SEQ ID NO: 14284 - RNA, 19 nt, artificial
  Oligomer
acugagauuaagguaaugg

SEQ ID NO: 14285 - RNA, 19 nt, artificial
  Oligomer
guuguauuccaguugaagg

SEQ ID NO: 14286 - RNA, 19 nt, artificial
  Oligomer
auguucucuucuuacaguc

SEQ ID NO: 14287 - RNA, 19 nt, artificial
  Oligomer
uucuuacagucuauaaagc

SEQ ID NO: 14288 - RNA, 19 nt, artificial
  Oligomer
uugagcaaauuauccuucu

SEQ ID NO: 14289 - RNA, 19 nt, artificial
  Oligomer
uucuucuccuuuugccagu

SEQ ID NO: 14290 - RNA, 19 nt, artificial
  Oligomer
aacauagucaucacaacug

SEQ ID NO: 14291 - RNA, 19 nt, artificial
  Oligomer
aaaggcuuuaaaucccagc

SEQ ID NO: 14292 - RNA, 19 nt, artificial
  Oligomer
cuucuuuugcuguucaacu

SEQ ID NO: 14293 - RNA, 19 nt, artificial
  Oligomer
uugcuguucaacuccagau

SEQ ID NO: 14294 - RNA, 19 nt, artificial
  Oligomer
uuagacauuugaagauagc

SEQ ID NO: 14295 - RNA, 19 nt, artificial
  Oligomer
ucuuuggacuaucccuuuc

SEQ ID NO: 14296 - RNA, 19 nt, artificial
  Oligomer
uccuucucucucugcaucu

SEQ ID NO: 14297 - RNA, 19 nt, artificial
  Oligomer
uucugagauguucucuucu

SEQ ID NO: 14298 - RNA, 19 nt, artificial
  Oligomer
augggagcagguuaucagg

SEQ ID NO: 14299 - RNA, 19 nt, artificial
  Oligomer
uugggaaacuguuguguug

SEQ ID NO: 14300 - RNA, 19 nt, artificial
  Oligomer
ucaaagucagauauacuag

SEQ ID NO: 14301 - RNA, 19 nt, artificial
  Oligomer
cuucagaacaacacacucg

SEQ ID NO: 14302 - RNA, 19 nt, artificial
  Oligomer
gugauaucaaagauggucc

SEQ ID NO: 14303 - RNA, 19 nt, artificial
  Oligomer
acuuggauggugauguucc

SEQ ID NO: 14304 - RNA, 19 nt, artificial
  Oligomer
ucacguagaagacccucca

SEQ ID NO: 14305 - RNA, 19 nt, artificial
  Oligomer
uguuagaccucucugcccu

SEQ ID NO: 14306 - RNA, 19 nt, artificial
  Oligomer
uagugagguagcuaaagcc

SEQ ID NO: 14307 - RNA, 19 nt, artificial
  Oligomer
uugagaaauguugucuucu

SEQ ID NO: 14308 - RNA, 19 nt, artificial
  Oligomer
auguugucuucuuuugcug

SEQ ID NO: 14309 - RNA, 19 nt, artificial
  Oligomer
uuacaaaacacacagagau

SEQ ID NO: 14310 - RNA, 19 nt, artificial
  Oligomer
uuuuagagaaaggagucau

SEQ ID NO: 14311 - RNA, 19 nt, artificial
  Oligomer
uguuccugggucuccaaag

SEQ ID NO: 14312 - RNA, 19 nt, artificial
  Oligomer
uuccuccuugacuacugcu

SEQ ID NO: 14313 - RNA, 19 nt, artificial
  Oligomer
aaaucauucgucuuacaug

SEQ ID NO: 14314 - RNA, 19 nt, artificial
  Oligomer
auuuccauuagucuccuaa

SEQ ID NO: 14315 - RNA, 19 nt, artificial
  Oligomer
auuuaguuucacagcuugc

SEQ ID NO: 14316 - RNA, 19 nt, artificial
  Oligomer
uagucucugaaguugaccu

SEQ ID NO: 14317 - RNA, 19 nt, artificial
  Oligomer
aauaacacugguauucucu

SEQ ID NO: 14318 - RNA, 19 nt, artificial
  Oligomer
uucucuaaagucccuucca

SEQ ID NO: 14319 - RNA, 19 nt, artificial
  Oligomer
uuccagaacucaagaauuc

SEQ ID NO: 14320 - RNA, 19 nt, artificial
  Oligomer
uugaucaaggucaccagag

SEQ ID NO: 14321 - RNA, 19 nt, artificial
  Oligomer
uugucauauugaaauccag

SEQ ID NO: 14322 - RNA, 19 nt, artificial
  Oligomer
auacuucagaacaacacac

SEQ ID NO: 14323 - RNA, 19 nt, artificial
  Oligomer
auugcugacaaaguaucug

SEQ ID NO: 14324 - RNA, 19 nt, artificial
  Oligomer
uauguugguguuagaccuc

SEQ ID NO: 14325 - RNA, 19 nt, artificial
  Oligomer
ugaagcagcauagugaggu

SEQ ID NO: 14326 - RNA, 19 nt, artificial
  Oligomer
uguucaacuccagauuuuc

SEQ ID NO: 14327 - RNA, 19 nt, artificial
  Oligomer
ugcugaugucagaaagacc

SEQ ID NO: 14328 - RNA, 19 nt, artificial
  Oligomer
cugcuuaguacauacacug

SEQ ID NO: 14329 - RNA, 19 nt, artificial
  Oligomer
cuuuggacuaucccuuucc

SEQ ID NO: 14330 - RNA, 19 nt, artificial
  Oligomer
uuggauaguucuccuuucu

SEQ ID NO: 14331 - RNA, 19 nt, artificial
  Oligomer
auaguucuccuuucugcug

SEQ ID NO: 14332 - RNA, 19 nt, artificial
  Oligomer
uggaauacuggguaaacac

SEQ ID NO: 14333 - RNA, 19 nt, artificial
  Oligomer
uguucaugccauacuuccu

SEQ ID NO: 14334 - RNA, 19 nt, artificial
  Oligomer
uaaacagcagcauaaaauc

SEQ ID NO: 14335 - RNA, 19 nt, artificial
  Oligomer
ucuucuacucugacauuag

SEQ ID NO: 14336 - RNA, 19 nt, artificial
  Oligomer
uacuuccagcagcacuuug

SEQ ID NO: 14337 - RNA, 19 nt, artificial
  Oligomer
ucucuaaagucccuuccag

SEQ ID NO: 14338 - RNA, 19 nt, artificial
  Oligomer
uaaagucccuuccagaacu

SEQ ID NO: 14339 - RNA, 19 nt, artificial
  Oligomer
auuccuccuucucucucug

SEQ ID NO: 14340 - RNA, 19 nt, artificial
  Oligomer
uccuccuucucucucugca

SEQ ID NO: 14341 - RNA, 19 nt, artificial
  Oligomer
auaacgucacuucagccag

SEQ ID NO: 14342 - RNA, 19 nt, artificial
  Oligomer
ucaaagaugguccgguucu

SEQ ID NO: 14343 - RNA, 19 nt, artificial
  Oligomer
uucuuuggguaaucuucag

SEQ ID NO: 14344 - RNA, 19 nt, artificial
  Oligomer
gucagcaccauuuucuucu

SEQ ID NO: 14345 - RNA, 19 nt, artificial
  Oligomer
uuggucacguggauaacac

SEQ ID NO: 14346 - RNA, 19 nt, artificial
  Oligomer
ucaaaagugaaagccaaca

SEQ ID NO: 14347 - RNA, 19 nt, artificial
  Oligomer
uguuucuucccuuaguauu

SEQ ID NO: 14348 - RNA, 19 nt, artificial
  Oligomer
uagucaucacaacuguuac

SEQ ID NO: 14349 - RNA, 19 nt, artificial
  Oligomer
uuugcuguucaacuccaga

SEQ ID NO: 14350 - RNA, 19 nt, artificial
  Oligomer
ugauuaucccagcuuaagu

SEQ ID NO: 14351 - RNA, 19 nt, artificial
  Oligomer
ucuggucuagugaauugug

SEQ ID NO: 14352 - RNA, 19 nt, artificial
  Oligomer
uuggcuaugucuuuccagu

SEQ ID NO: 14353 - RNA, 19 nt, artificial
  Oligomer
uugaagauagcuuacugcu

SEQ ID NO: 14354 - RNA, 19 nt, artificial
  Oligomer
ggaaauuaguuuuggauag

SEQ ID NO: 14355 - RNA, 19 nt, artificial
  Oligomer
ucuccuuucugcuguaccu

SEQ ID NO: 14356 - RNA, 19 nt, artificial
  Oligomer
uuucugcuguaccucaugg

SEQ ID NO: 14357 - RNA, 19 nt, artificial
  Oligomer
aaaaaaauggaauacuggg

SEQ ID NO: 14358 - RNA, 19 nt, artificial
  Oligomer
ucuccuaaagauguucaug

SEQ ID NO: 14359 - RNA, 19 nt, artificial
  Oligomer
ugcugaagaaaaauuccac

SEQ ID NO: 14360 - RNA, 19 nt, artificial
  Oligomer
uaggaaaucuggguucugg

SEQ ID NO: 14361 - RNA, 19 nt, artificial
  Oligomer
ugugcccaccauauuccuc

SEQ ID NO: 14362 - RNA, 19 nt, artificial
  Oligomer
ucccagaagaggucaauug

SEQ ID NO: 14363 - RNA, 19 nt, artificial
  Oligomer
uacucgggccauauauuca

SEQ ID NO: 14364 - RNA, 19 nt, artificial
  Oligomer
uucuccuuuugccaguaga

SEQ ID NO: 14365 - RNA, 19 nt, artificial
  Oligomer
aacagaagugagaaagacc

SEQ ID NO: 14366 - RNA, 19 nt, artificial
  Oligomer
uucuguuacuuuacagagg

SEQ ID NO: 14367 - RNA, 19 nt, artificial
  Oligomer
aauccaauugcucacguag

SEQ ID NO: 14368 - RNA, 19 nt, artificial
  Oligomer
uguugguguuagaccucuc

SEQ ID NO: 14369 - RNA, 19 nt, artificial
  Oligomer
auaaugugauuaucccagc

SEQ ID NO: 14370 - RNA, 19 nt, artificial
  Oligomer
uaucccagcuuaaguugcg

SEQ ID NO: 14371 - RNA, 19 nt, artificial
  Oligomer
uuguggaaggcaguuuuag

SEQ ID NO: 14372 - RNA, 19 nt, artificial
  Oligomer
cuugacuacugcuuugacg

SEQ ID NO: 14373 - RNA, 19 nt, artificial
  Oligomer
uuugacguaccuaaaucau

SEQ ID NO: 14374 - RNA, 19 nt, artificial
  Oligomer
uuuuguaaacagcagcaua

SEQ ID NO: 14375 - RNA, 19 nt, artificial
  Oligomer
uaaaaucuucuacucugac

SEQ ID NO: 14376 - RNA, 19 nt, artificial
  Oligomer
auaauucgggucaccuccc

SEQ ID NO: 14377 - RNA, 19 nt, artificial
  Oligomer
auucugcauuucaaaacac

SEQ ID NO: 14378 - RNA, 19 nt, artificial
  Oligomer
uacuucugugcccaccaua

SEQ ID NO: 14379 - RNA, 19 nt, artificial
  Oligomer
ugauucacucuuaaauguc

SEQ ID NO: 14380 - RNA, 19 nt, artificial
  Oligomer
uagguguagggaagucagc

SEQ ID NO: 14381 - RNA, 19 nt, artificial
  Oligomer
uugacugauaacgucacuu

SEQ ID NO: 14382 - RNA, 19 nt, artificial
  Oligomer
aauggagagguuauuagug

SEQ ID NO: 14383 - RNA, 19 nt, artificial
  Oligomer
ugguguuagaccucucugc

SEQ ID NO: 14384 - RNA, 19 nt, artificial
  Oligomer
uuaucccagcuuaaguugc

SEQ ID NO: 14385 - RNA, 19 nt, artificial
  Oligomer
aauaccaaggagaaaaagc

SEQ ID NO: 14386 - RNA, 19 nt, artificial
  Oligomer
ugaaccaguuaagucuuug

SEQ ID NO: 14387 - RNA, 19 nt, artificial
  Oligomer
uaucccuuuccuccuugac

SEQ ID NO: 14388 - RNA, 19 nt, artificial
  Oligomer
ucccuuuccuccuugacua

SEQ ID NO: 14389 - RNA, 19 nt, artificial
  Oligomer
uccuccuugacuacugcuu

SEQ ID NO: 14390 - RNA, 19 nt, artificial
  Oligomer
uuacaugucagaggaaauu

SEQ ID NO: 14391 - RNA, 19 nt, artificial
  Oligomer
uuccauuagucuccuaaag

SEQ ID NO: 14392 - RNA, 19 nt, artificial
  Oligomer
auuagucuccuaaagaugu

SEQ ID NO: 14393 - RNA, 19 nt, artificial
  Oligomer
uugccugacauauauaugu

SEQ ID NO: 14394 - RNA, 19 nt, artificial
  Oligomer
acugguauucucuaaaguc

SEQ ID NO: 14395 - RNA, 19 nt, artificial
  Oligomer
cugcauuucaaaacaccuu

SEQ ID NO: 14396 - RNA, 19 nt, artificial
  Oligomer
accauauuccucuagacac

SEQ ID NO: 14397 - RNA, 19 nt, artificial
  Oligomer
cucaaucucucauuccucc

SEQ ID NO: 14398 - RNA, 19 nt, artificial
  Oligomer
cuucucucucugcaucuug

SEQ ID NO: 14399 - RNA, 19 nt, artificial
  Oligomer
auuaaagaaacgguucaac

SEQ ID NO: 14400 - RNA, 19 nt, artificial
  Oligomer
ucccuuaguauugcugaca

SEQ ID NO: 14401 - RNA, 19 nt, artificial
  Oligomer
auacgggaaacacugcuag

SEQ ID NO: 14402 - RNA, 19 nt, artificial
  Oligomer
agaaagacccagaaauacc

SEQ ID NO: 14403 - RNA, 19 nt, artificial
  Oligomer
aucuaaggaggcccuaugg

SEQ ID NO: 14404 - RNA, 19 nt, artificial
  Oligomer
uccaauaugaaccaguuaa

SEQ ID NO: 14405 - RNA, 19 nt, artificial
  Oligomer
aauaugaaccaguuaaguc

SEQ ID NO: 14406 - RNA, 19 nt, artificial
  Oligomer
guauauaccaguuaacagg

SEQ ID NO: 14407 - RNA, 19 nt, artificial
  Oligomer
cugguauucucuaaagucc

SEQ ID NO: 14408 - RNA, 19 nt, artificial
  Oligomer
auuucaaaacaccuugauc

SEQ ID NO: 14409 - RNA, 19 nt, artificial
  Oligomer
acugaagugaagaagcacc

SEQ ID NO: 14410 - RNA, 19 nt, artificial
  Oligomer
uauacagggcguacacuuu

SEQ ID NO: 14411 - RNA, 19 nt, artificial
  Oligomer
aggaaaaugcucuugcuug

SEQ ID NO: 14412 - RNA, 19 nt, artificial
  Oligomer
auagagcucaguuucagga

SEQ ID NO: 14413 - RNA, 19 nt, artificial
  Oligomer
uggaauuucaaagucagau

SEQ ID NO: 14414 - RNA, 19 nt, artificial
  Oligomer
uacuucagaacaacacacu

SEQ ID NO: 14415 - RNA, 19 nt, artificial
  Oligomer
auaucaaagaugguccggu

SEQ ID NO: 14416 - RNA, 19 nt, artificial
  Oligomer
aucugcuguagaauacagg

SEQ ID NO: 14417 - RNA, 19 nt, artificial
  Oligomer
uuuuacacaggagcaaggu

SEQ ID NO: 14418 - RNA, 19 nt, artificial
  Oligomer
uaaaggcuuuaaaucccag

SEQ ID NO: 14419 - RNA, 19 nt, artificial
  Oligomer
ucauucgucuuacauguca

SEQ ID NO: 14420 - RNA, 19 nt, artificial
  Oligomer
ugucagaggaaauuaguuu

SEQ ID NO: 14421 - RNA, 19 nt, artificial
  Oligomer
auuacauugggcuuuugua

SEQ ID NO: 14422 - RNA, 19 nt, artificial
  Oligomer
ucugacauuaggaaaucag

SEQ ID NO: 14423 - RNA, 19 nt, artificial
  Oligomer
uauauaccaguuaacaggc

SEQ ID NO: 14424 - RNA, 19 nt, artificial
  Oligomer
uguuauacagggcguacac

SEQ ID NO: 14425 - RNA, 19 nt, artificial
  Oligomer
aagguaauggcccaggaug

SEQ ID NO: 14426 - RNA, 19 nt, artificial
  Oligomer
uugcuugguuguauuccag

SEQ ID NO: 14427 - RNA, 19 nt, artificial
  Oligomer
auucacucuuaaaugucca

SEQ ID NO: 14428 - RNA, 19 nt, artificial
  Oligomer
uauugaaauccaguuugcu

SEQ ID NO: 14429 - RNA, 19 nt, artificial
  Oligomer
ucuuacagucuauaaagca

SEQ ID NO: 14430 - RNA, 19 nt, artificial
  Oligomer
uaacgucacuucagccagg

SEQ ID NO: 14431 - RNA, 19 nt, artificial
  Oligomer
aguuugugccagcucuuca

SEQ ID NO: 14432 - RNA, 19 nt, artificial
  Oligomer
aacagaaacauugugacca

SEQ ID NO: 14433 - RNA, 19 nt, artificial
  Oligomer
uaaagaaacgguucaacuu

SEQ ID NO: 14434 - RNA, 19 nt, artificial
  Oligomer
uuaguauugcugacaaagu

SEQ ID NO: 14435 - RNA, 19 nt, artificial
  Oligomer
uguugucuucuuuugcugu

SEQ ID NO: 14436 - RNA, 19 nt, artificial
  Oligomer
cuuaaguugcguccacuuc

SEQ ID NO: 14437 - RNA, 19 nt, artificial
  Oligomer
uuuacaaaacacacagaga

SEQ ID NO: 14438 - RNA, 19 nt, artificial
  Oligomer
uaccuuagacauuugaaga

SEQ ID NO: 14439 - RNA, 19 nt, artificial
  Oligomer
uagacauuugaagauagcu

SEQ ID NO: 14440 - RNA, 19 nt, artificial
  Oligomer
aaucauucgucuuacaugu

SEQ ID NO: 14441 - RNA, 19 nt, artificial
  Oligomer
ucaugccauacuuccuaug

SEQ ID NO: 14442 - RNA, 19 nt, artificial
  Oligomer
aaauucuacuuccagcagc

SEQ ID NO: 14443 - RNA, 19 nt, artificial
  Oligomer
uuccagcagcacuuugccu

SEQ ID NO: 14444 - RNA, 19 nt, artificial
  Oligomer
cuggccuuuauaauucggg

SEQ ID NO: 14445 - RNA, 19 nt, artificial
  Oligomer
aacaccuugaucaagguca

SEQ ID NO: 14446 - RNA, 19 nt, artificial
  Oligomer
auacguaaagggcaaggug

SEQ ID NO: 14447 - RNA, 19 nt, artificial
  Oligomer
uguccaucugaggaaguuc

SEQ ID NO: 14448 - RNA, 19 nt, artificial
  Oligomer
cuucagaucuuuucagccc

SEQ ID NO: 14449 - RNA, 19 nt, artificial
  Oligomer
augagacacaugaagcugu

SEQ ID NO: 14450 - RNA, 19 nt, artificial
  Oligomer
uagggaagucagcuuugac

SEQ ID NO: 14451 - RNA, 19 nt, artificial
  Oligomer
uuugccaguagaugcgagu

SEQ ID NO: 14452 - RNA, 19 nt, artificial
  Oligomer
ugugccagcucuucaacag

SEQ ID NO: 14453 - RNA, 19 nt, artificial
  Oligomer
cagcguugccacuucuuuc

SEQ ID NO: 14454 - RNA, 19 nt, artificial
  Oligomer
ucuguuacuuuacagaggg

SEQ ID NO: 14455 - RNA, 19 nt, artificial
  Oligomer
uauugcugacaaaguaucu

SEQ ID NO: 14456 - RNA, 19 nt, artificial
  Oligomer
uguagaauacaggaauuac

SEQ ID NO: 14457 - RNA, 19 nt, artificial
  Oligomer
aaacauagucaucacaacu

SEQ ID NO: 14458 - RNA, 19 nt, artificial
  Oligomer
uaaguauuccugucaauac

SEQ ID NO: 14459 - RNA, 19 nt, artificial
  Oligomer
ugucaauacgggaaacacu

SEQ ID NO: 14460 - RNA, 19 nt, artificial
  Oligomer
gucaauacgggaaacacug

SEQ ID NO: 14461 - RNA, 19 nt, artificial
  Oligomer
ucaauacgggaaacacugc

SEQ ID NO: 14462 - RNA, 19 nt, artificial
  Oligomer
uacacaggagcaagguuug

SEQ ID NO: 14463 - RNA, 19 nt, artificial
  Oligomer
auguuuacaaaacacacag

SEQ ID NO: 14464 - RNA, 19 nt, artificial
  Oligomer
uuacuaccuuagacauuug

SEQ ID NO: 14465 - RNA, 19 nt, artificial
  Oligomer
uucugcuguaccucauggg

SEQ ID NO: 14466 - RNA, 19 nt, artificial
  Oligomer
uuuguaaacagcagcauaa

SEQ ID NO: 14467 - RNA, 19 nt, artificial
  Oligomer
auagucucugaaguugacc

SEQ ID NO: 14468 - RNA, 19 nt, artificial
  Oligomer
auuggacaaauucuacuuc

SEQ ID NO: 14469 - RNA, 19 nt, artificial
  Oligomer
gugcccaccauauuccucu

SEQ ID NO: 14470 - RNA, 19 nt, artificial
  Oligomer
cucucauuccuccuucucu

SEQ ID NO: 14471 - RNA, 19 nt, artificial
  Oligomer
uuuuccaaccaggagaggu

SEQ ID NO: 14472 - RNA, 19 nt, artificial
  Oligomer
uuggaauuucaaagucaga

SEQ ID NO: 14473 - RNA, 19 nt, artificial
  Oligomer
uaugugcccucgucagaug

SEQ ID NO: 14474 - RNA, 19 nt, artificial
  Oligomer
ucgggccauauauucaugu

SEQ ID NO: 14475 - RNA, 19 nt, artificial
  Oligomer
uggguaaucuucagagagg

SEQ ID NO: 14476 - RNA, 19 nt, artificial
  Oligomer
uaacaccugaacagaagug

SEQ ID NO: 14477 - RNA, 19 nt, artificial
  Oligomer
uuggacccaaguaagacca

SEQ ID NO: 14478 - RNA, 19 nt, artificial
  Oligomer
ugagguagcuaaagccaug

SEQ ID NO: 14479 - RNA, 19 nt, artificial
  Oligomer
uugcguccacuucuggucu

SEQ ID NO: 14480 - RNA, 19 nt, artificial
  Oligomer
aaaguuacuaccuuagaca

SEQ ID NO: 14481 - RNA, 19 nt, artificial
  Oligomer
cuuuccuccuugacuacug

SEQ ID NO: 14482 - RNA, 19 nt, artificial
  Oligomer
acuacugcuuugacguacc

SEQ ID NO: 14483 - RNA, 19 nt, artificial
  Oligomer
ucgucuuacaugucagagg

SEQ ID NO: 14484 - RNA, 19 nt, artificial
  Oligomer
uugggcuuuuguaaacagc

SEQ ID NO: 14485 - RNA, 19 nt, artificial
  Oligomer
uacagaggguuugaguuca

SEQ ID NO: 14486 - RNA, 19 nt, artificial
  Oligomer
ucugaaguugaccuguuau

SEQ ID NO: 14487 - RNA, 19 nt, artificial
  Oligomer
uauaccaguuaacaggcca

SEQ ID NO: 14488 - RNA, 19 nt, artificial
  Oligomer
uaauaacacugguauucuc

SEQ ID NO: 14489 - RNA, 19 nt, artificial
  Oligomer
ucaaggucaccagagcuac

SEQ ID NO: 14490 - RNA, 19 nt, artificial
  Oligomer
uacacuuucccuucucaau

SEQ ID NO: 14491 - RNA, 19 nt, artificial
  Oligomer
aucaggaaaaugcucuugc

SEQ ID NO: 14492 - RNA, 19 nt, artificial
  Oligomer
aauucuucuccauuuucca

SEQ ID NO: 14493 - RNA, 19 nt, artificial
  Oligomer
ucuucuccauuuuccaacc

SEQ ID NO: 14494 - RNA, 19 nt, artificial
  Oligomer
uauacuagguguagggaag

SEQ ID NO: 14495 - RNA, 19 nt, artificial
  Oligomer
uugccacuucuuucacuuc

SEQ ID NO: 14496 - RNA, 19 nt, artificial
  Oligomer
acagaagugagaaagacca

SEQ ID NO: 14497 - RNA, 19 nt, artificial
  Oligomer
agaagugagaaagaccagc

SEQ ID NO: 14498 - RNA, 19 nt, artificial
  Oligomer
aauugagguauggacacuu

SEQ ID NO: 14499 - RNA, 19 nt, artificial
  Oligomer
augcuuagggucaaaagug

SEQ ID NO: 14500 - RNA, 19 nt, artificial
  Oligomer
acuuuguuucuucccuuag

SEQ ID NO: 14501 - RNA, 19 nt, artificial
  Oligomer
uuguuucuucccuuaguau

SEQ ID NO: 14502 - RNA, 19 nt, artificial
  Oligomer
guuucuucccuuaguauug

SEQ ID NO: 14503 - RNA, 19 nt, artificial
  Oligomer
uagaagacccuccagugau

SEQ ID NO: 14504 - RNA, 19 nt, artificial
  Oligomer
cuuauguugguguuagacc

SEQ ID NO: 14505 - RNA, 19 nt, artificial
  Oligomer
aauguugucuucuuuugcu

SEQ ID NO: 14506 - RNA, 19 nt, artificial
  Oligomer
ugauguuuacaaaacacac

SEQ ID NO: 14507 - RNA, 19 nt, artificial
  Oligomer
ucccagcuuaaguugcguc

SEQ ID NO: 14508 - RNA, 19 nt, artificial
  Oligomer
uauggaaaguuacuaccuu

SEQ ID NO: 14509 - RNA, 19 nt, artificial
  Oligomer
auagcuuacugcuuaguac

SEQ ID NO: 14510 - RNA, 19 nt, artificial
  Oligomer
augaggucaaacuagcaua

SEQ ID NO: 14511 - RNA, 19 nt, artificial
  Oligomer
acuaucccuuuccuccuug

SEQ ID NO: 14512 - RNA, 19 nt, artificial
  Oligomer
uacugcuuugacguaccua

SEQ ID NO: 14513 - RNA, 19 nt, artificial
  Oligomer
uggauaguucuccuuucug

SEQ ID NO: 14514 - RNA, 19 nt, artificial
  Oligomer
uuguggauuuaguuucaca

SEQ ID NO: 14515 - RNA, 19 nt, artificial
  Oligomer
uagucuccuaaagauguuc

SEQ ID NO: 14516 - RNA, 19 nt, artificial
  Oligomer
cauaaaaucuucuacucug

SEQ ID NO: 14517 - RNA, 19 nt, artificial
  Oligomer
acaaauucuacuuccagca

SEQ ID NO: 14518 - RNA, 19 nt, artificial
  Oligomer
acuuccagcagcacuuugc

SEQ ID NO: 14519 - RNA, 19 nt, artificial
  Oligomer
ucuaaagucccuuccagaa

SEQ ID NO: 14520 - RNA, 19 nt, artificial
  Oligomer
ucccuucucaaucucucau

SEQ ID NO: 14521 - RNA, 19 nt, artificial
  Oligomer
cagcauaucacaaaaauuc

SEQ ID NO: 14522 - RNA, 19 nt, artificial
  Oligomer
ugagauuaagguaauggcc

SEQ ID NO: 14523 - RNA, 19 nt, artificial
  Oligomer
agauguucucuucuuacag

SEQ ID NO: 14524 - RNA, 19 nt, artificial
  Oligomer
auacuugaugagacacaug

SEQ ID NO: 14525 - RNA, 19 nt, artificial
  Oligomer
uuugacugauaacgucacu

SEQ ID NO: 14526 - RNA, 19 nt, artificial
  Oligomer
uugaguucacucaguacuu

SEQ ID NO: 14527 - RNA, 19 nt, artificial
  Oligomer
aagccaacaauuuggaccc

SEQ ID NO: 14528 - RNA, 19 nt, artificial
  Oligomer
aaggcuuuaaaucccagcc

SEQ ID NO: 14529 - RNA, 19 nt, artificial
  Oligomer
uaaugugauuaucccagcu

SEQ ID NO: 14530 - RNA, 19 nt, artificial
  Oligomer
uagugaauuguggaaggca

SEQ ID NO: 14531 - RNA, 19 nt, artificial
  Oligomer
uaacaugaacagcaguugg

SEQ ID NO: 14532 - RNA, 19 nt, artificial
  Oligomer
agacccagaaauaccaagg

SEQ ID NO: 14533 - RNA, 19 nt, artificial
  Oligomer
uacugcuuaguacauacac

SEQ ID NO: 14534 - RNA, 19 nt, artificial
  Oligomer
uacaaaugaggucaaacua

SEQ ID NO: 14535 - RNA, 19 nt, artificial
  Oligomer
ucaaacuagcauaaagcca

SEQ ID NO: 14536 - RNA, 19 nt, artificial
  Oligomer
acugcuuugacguaccuaa

SEQ ID NO: 14537 - RNA, 19 nt, artificial
  Oligomer
uacuggguaaacaccaaua

SEQ ID NO: 14538 - RNA, 19 nt, artificial
  Oligomer
uccauuagucuccuaaaga

SEQ ID NO: 14539 - RNA, 19 nt, artificial
  Oligomer
uccuaaagauguucaugcc

SEQ ID NO: 14540 - RNA, 19 nt, artificial
  Oligomer
aagauguucaugccauacu

SEQ ID NO: 14541 - RNA, 19 nt, artificial
  Oligomer
uuacauugggcuuuuguaa

SEQ ID NO: 14542 - RNA, 19 nt, artificial
  Oligomer
acugauaaagggaaagagc

SEQ ID NO: 14543 - RNA, 19 nt, artificial
  Oligomer
uccagaacucaagaauucu

SEQ ID NO: 14544 - RNA, 19 nt, artificial
  Oligomer
uucccagaagaggucaauu

SEQ ID NO: 14545 - RNA, 19 nt, artificial
  Oligomer
uuaagguaauggcccagga

SEQ ID NO: 14546 - RNA, 19 nt, artificial
  Oligomer
ugaggcucuggaaaaccuc

SEQ ID NO: 14547 - RNA, 19 nt, artificial
  Oligomer
uaaagcaaugacaaaucac

SEQ ID NO: 14548 - RNA, 19 nt, artificial
  Oligomer
augagaugugcauuugaga

SEQ ID NO: 14549 - RNA, 19 nt, artificial
  Oligomer
gugcauuugagaaauguug

SEQ ID NO: 14550 - RNA, 19 nt, artificial
  Oligomer
uuagggaucuaaggaggcc

SEQ ID NO: 14551 - RNA, 19 nt, artificial
  Oligomer
acuguaaacaacgaucuca

SEQ ID NO: 14552 - RNA, 19 nt, artificial
  Oligomer
uuuggacuaucccuuuccu

SEQ ID NO: 14553 - RNA, 19 nt, artificial
  Oligomer
uccuuucugcuguaccuca

SEQ ID NO: 14554 - RNA, 19 nt, artificial
  Oligomer
agcaauagagaacacaaug

SEQ ID NO: 14555 - RNA, 19 nt, artificial
  Oligomer
auuaggaaaucagauaguc

SEQ ID NO: 14556 - RNA, 19 nt, artificial
  Oligomer
accagagcuacuucugugc

SEQ ID NO: 14557 - RNA, 19 nt, artificial
  Oligomer
cugagauuaagguaauggc

SEQ ID NO: 14558 - RNA, 19 nt, artificial
  Oligomer
uuccaguugaaggucugau

SEQ ID NO: 14559 - RNA, 19 nt, artificial
  Oligomer
acuucagaacaacacacuc

SEQ ID NO: 14560 - RNA, 19 nt, artificial
  Oligomer
augacaauccaauugcuca

SEQ ID NO: 14561 - RNA, 19 nt, artificial
  Oligomer
ucugcuguagaauacagga

SEQ ID NO: 14562 - RNA, 19 nt, artificial
  Oligomer
ucacaacuguuacuaaaug

SEQ ID NO: 14563 - RNA, 19 nt, artificial
  Oligomer
acguagaagacccuccagu

SEQ ID NO: 14564 - RNA, 19 nt, artificial
  Oligomer
auguugguguuagaccucu

SEQ ID NO: 14565 - RNA, 19 nt, artificial
  Oligomer
uuagaccucucugcccuac

SEQ ID NO: 14566 - RNA, 19 nt, artificial
  Oligomer
cucuaaaggcuuuaaaucc

SEQ ID NO: 14567 - RNA, 19 nt, artificial
  Oligomer
aacaugaacagcaguuggc

SEQ ID NO: 14568 - RNA, 19 nt, artificial
  Oligomer
uaugaaccaguuaagucuu

SEQ ID NO: 14569 - RNA, 19 nt, artificial
  Oligomer
uuaggaaaucuggguucug

SEQ ID NO: 14570 - RNA, 19 nt, artificial
  Oligomer
ucuggcgcuggccuuuaua

SEQ ID NO: 14571 - RNA, 19 nt, artificial
  Oligomer
aaauccuuugauuucaggg

SEQ ID NO: 14572 - RNA, 19 nt, artificial
  Oligomer
ucaagaauucugcauuuca

SEQ ID NO: 14573 - RNA, 19 nt, artificial
  Oligomer
auauuccucuagacacuuc

SEQ ID NO: 14574 - RNA, 19 nt, artificial
  Oligomer
uagacacuuccugcaaagc

SEQ ID NO: 14575 - RNA, 19 nt, artificial
  Oligomer
uccaucugaggaaguuccc

SEQ ID NO: 14576 - RNA, 19 nt, artificial
  Oligomer
aagaggucaauugcaaaug

SEQ ID NO: 14577 - RNA, 19 nt, artificial
  Oligomer
ucaauugcaaauggaggug

SEQ ID NO: 14578 - RNA, 19 nt, artificial
  Oligomer
ucucucucugcaucuuggg

SEQ ID NO: 14579 - RNA, 19 nt, artificial
  Oligomer
agcauaucacaaaaauucc

SEQ ID NO: 14580 - RNA, 19 nt, artificial
  Oligomer
agguuaucaggaaaaugcu

SEQ ID NO: 14581 - RNA, 19 nt, artificial
  Oligomer
uccaguugaaggucugauu

SEQ ID NO: 14582 - RNA, 19 nt, artificial
  Oligomer
ugguugguugucauauuga

SEQ ID NO: 14583 - RNA, 19 nt, artificial
  Oligomer
ucucuucuuacagucuaua

SEQ ID NO: 14584 - RNA, 19 nt, artificial
  Oligomer
cuucuuacagucuauaaag

SEQ ID NO: 14585 - RNA, 19 nt, artificial
  Oligomer
uacagucuauaaagcaaug

SEQ ID NO: 14586 - RNA, 19 nt, artificial
  Oligomer
uucccgcuugaaagcgucu

SEQ ID NO: 14587 - RNA, 19 nt, artificial
  Oligomer
auugugaccacaggacagc

SEQ ID NO: 14588 - RNA, 19 nt, artificial
  Oligomer
auggcuucagaugcuuagg

SEQ ID NO: 14589 - RNA, 19 nt, artificial
  Oligomer
cugaugacaauccaauugc

SEQ ID NO: 14590 - RNA, 19 nt, artificial
  Oligomer
uagaaacauagucaucaca

SEQ ID NO: 14591 - RNA, 19 nt, artificial
  Oligomer
uuuacacaggagcaagguu

SEQ ID NO: 14592 - RNA, 19 nt, artificial
  Oligomer
uaaaucccagccauguggc

SEQ ID NO: 14593 - RNA, 19 nt, artificial
  Oligomer
uagagaaaggagucaugag

SEQ ID NO: 14594 - RNA, 19 nt, artificial
  Oligomer
aaagauguucaugccauac

SEQ ID NO: 14595 - RNA, 19 nt, artificial
  Oligomer
uucaugccauacuuccuau

SEQ ID NO: 14596 - RNA, 19 nt, artificial
  Oligomer
auacuuccuaugcauuaca

SEQ ID NO: 14597 - RNA, 19 nt, artificial
  Oligomer
cuaugcauuacauugggcu

SEQ ID NO: 14598 - RNA, 19 nt, artificial
  Oligomer
uaugcauuacauugggcuu

SEQ ID NO: 14599 - RNA, 19 nt, artificial
  Oligomer
aacagcagcauaaaaucuu

SEQ ID NO: 14600 - RNA, 19 nt, artificial
  Oligomer
auaccaguuaacaggccac

SEQ ID NO: 14601 - RNA, 19 nt, artificial
  Oligomer
ugccuuugucauuaauaac

SEQ ID NO: 14602 - RNA, 19 nt, artificial
  Oligomer
acuuccugcaaagcaacug

SEQ ID NO: 14603 - RNA, 19 nt, artificial
  Oligomer
uccauuuacugagauuaag

SEQ ID NO: 14604 - RNA, 19 nt, artificial
  Oligomer
uguauuccaguugaagguc

SEQ ID NO: 14605 - RNA, 19 nt, artificial
  Oligomer
uguucucuucuuacagucu

SEQ ID NO: 14606 - RNA, 19 nt, artificial
  Oligomer
ugacugauaacgucacuuc

SEQ ID NO: 14607 - RNA, 19 nt, artificial
  Oligomer
agcgucuuuuucauacuuc

SEQ ID NO: 14608 - RNA, 19 nt, artificial
  Oligomer
uagucagcaccauuuucuu

SEQ ID NO: 14609 - RNA, 19 nt, artificial
  Oligomer
uguuacuuuacagaggguu

SEQ ID NO: 14610 - RNA, 19 nt, artificial
  Oligomer
aagaaacgguucaacuuug

SEQ ID NO: 14611 - RNA, 19 nt, artificial
  Oligomer
uucccuuaguauugcugac

SEQ ID NO: 14612 - RNA, 19 nt, artificial
  Oligomer
uaccuuauguugguguuag

SEQ ID NO: 14613 - RNA, 19 nt, artificial
  Oligomer
auagugagguagcuaaagc

SEQ ID NO: 14614 - RNA, 21 nt, artificial
  Oligomer
ggaggugacccgaauuauaaa

SEQ ID NO: 14615 - RNA, 21 nt, artificial
  Oligomer
caagguguuuugaaaugcaga

SEQ ID NO: 14616 - RNA, 21 nt, artificial
  Oligomer
gaaugauuuagguacgucaaa

SEQ ID NO: 14617 - RNA, 21 nt, artificial
  Oligomer
aggagaacuauccaaaacuaa

SEQ ID NO: 14618 - RNA, 21 nt, artificial
  Oligomer
ggaggaaugagagauugagaa

SEQ ID NO: 14619 - RNA, 21 nt, artificial
  Oligomer
ggcagagaggucuaacaccaa

SEQ ID NO: 14620 - RNA, 21 nt, artificial
  Oligomer
gaaggaggaaugagagauuga

SEQ ID NO: 14621 - RNA, 21 nt, artificial
  Oligomer
ggagaacuauccaaaacuaau

SEQ ID NO: 14622 - RNA, 21 nt, artificial
  Oligomer
cagcaauacuaagggaagaaa

SEQ ID NO: 14623 - RNA, 21 nt, artificial
  Oligomer
ggaccaucuuugauaucacua

SEQ ID NO: 14624 - RNA, 21 nt, artificial
  Oligomer
ggaggaaagggauaguccaaa

SEQ ID NO: 14625 - RNA, 21 nt, artificial
  Oligomer
ggaaguagaauuuguccaaua

SEQ ID NO: 14626 - RNA, 21 nt, artificial
  Oligomer
gaaaguguacgcccuguauaa

SEQ ID NO: 14627 - RNA, 21 nt, artificial
  Oligomer
gcagggaacaucaccauccaa

SEQ ID NO: 14628 - RNA, 21 nt, artificial
  Oligomer
gccacauggcugggauuuaaa

SEQ ID NO: 14629 - RNA, 21 nt, artificial
  Oligomer
gagagaaggaggaaugagaga

SEQ ID NO: 14630 - RNA, 21 nt, artificial
  Oligomer
ccuuaaucucaguaaauggaa

SEQ ID NO: 14631 - RNA, 21 nt, artificial
  Oligomer
ggaacuuccucagauggacaa

SEQ ID NO: 14632 - RNA, 21 nt, artificial
  Oligomer
gcagaaaggagaacuauccaa

SEQ ID NO: 14633 - RNA, 21 nt, artificial
  Oligomer
gaauauauggcccgaguacaa

SEQ ID NO: 14634 - RNA, 21 nt, artificial
  Oligomer
gcagauacuuugucagcaaua

SEQ ID NO: 14635 - RNA, 21 nt, artificial
  Oligomer
ccuugaucaagguguuuugaa

SEQ ID NO: 14636 - RNA, 21 nt, artificial
  Oligomer
gggaaaugucgccucucugaa

SEQ ID NO: 14637 - RNA, 21 nt, artificial
  Oligomer
ccacaauucacuagaccagaa

SEQ ID NO: 14638 - RNA, 21 nt, artificial
  Oligomer
gguucauauuggacugauaau

SEQ ID NO: 14639 - RNA, 21 nt, artificial
  Oligomer
gggaggugacccgaauuauaa

SEQ ID NO: 14640 - RNA, 21 nt, artificial
  Oligomer
ggaaaguguacgcccuguaua

SEQ ID NO: 14641 - RNA, 21 nt, artificial
  Oligomer
gagagagaaggaggaaugaga

SEQ ID NO: 14642 - RNA, 21 nt, artificial
  Oligomer
gaagugacguuaucagucaaa

SEQ ID NO: 14643 - RNA, 21 nt, artificial
  Oligomer
guacgucaaagcaguagucaa

SEQ ID NO: 14644 - RNA, 21 nt, artificial
  Oligomer
aggaauauggugggcacagaa

SEQ ID NO: 14645 - RNA, 21 nt, artificial
  Oligomer
cguauugacaggaauacuuaa

SEQ ID NO: 14646 - RNA, 21 nt, artificial
  Oligomer
uggaguugaacagcaaaagaa

SEQ ID NO: 14647 - RNA, 21 nt, artificial
  Oligomer
gagucuuacccugaaaucaaa

SEQ ID NO: 14648 - RNA, 21 nt, artificial
  Oligomer
ccuaguauaucugacuuugaa

SEQ ID NO: 14649 - RNA, 21 nt, artificial
  Oligomer
caaaguugaaccguuucuuua

SEQ ID NO: 14650 - RNA, 21 nt, artificial
  Oligomer
aaaccuugcuccuguguaaaa

SEQ ID NO: 14651 - RNA, 21 nt, artificial
  Oligomer
caauaacaggucaacuucaga

SEQ ID NO: 14652 - RNA, 21 nt, artificial
  Oligomer
gcaggaagugucuagaggaau

SEQ ID NO: 14653 - RNA, 21 nt, artificial
  Oligomer
agaccuucaacuggaauacaa

SEQ ID NO: 14654 - RNA, 21 nt, artificial
  Oligomer
caaaacuaauuuccucugaca

SEQ ID NO: 14655 - RNA, 21 nt, artificial
  Oligomer
ggucacaauguuucuguugaa

SEQ ID NO: 14656 - RNA, 21 nt, artificial
  Oligomer
agguguuauccacgugaccaa

SEQ ID NO: 14657 - RNA, 21 nt, artificial
  Oligomer
gcuaguuugaccucauuugua

SEQ ID NO: 14658 - RNA, 21 nt, artificial
  Oligomer
ugaacaucuuuaggagacuaa

SEQ ID NO: 14659 - RNA, 21 nt, artificial
  Oligomer
caaagugcugcuggaaguaga

SEQ ID NO: 14660 - RNA, 21 nt, artificial
  Oligomer
aagguguuuugaaaugcagaa

SEQ ID NO: 14661 - RNA, 21 nt, artificial
  Oligomer
aagggaagaaacaaaguugaa

SEQ ID NO: 14662 - RNA, 21 nt, artificial
  Oligomer
ucaugacuccuuucucuaaaa

SEQ ID NO: 14663 - RNA, 21 nt, artificial
  Oligomer
agaggucuaacaccaacauaa

SEQ ID NO: 14664 - RNA, 21 nt, artificial
  Oligomer
cagagaggucuaacaccaaca

SEQ ID NO: 14665 - RNA, 21 nt, artificial
  Oligomer
gcauaggaaguauggcaugaa

SEQ ID NO: 14666 - RNA, 21 nt, artificial
  Oligomer
caggaagugucuagaggaaua

SEQ ID NO: 14667 - RNA, 21 nt, artificial
  Oligomer
cauccugggccauuaccuuaa

SEQ ID NO: 14668 - RNA, 21 nt, artificial
  Oligomer
gaaucagaccuucaacuggaa

SEQ ID NO: 14669 - RNA, 21 nt, artificial
  Oligomer
acuggcaaaaggagaagaaaa

SEQ ID NO: 14670 - RNA, 21 nt, artificial
  Oligomer
cacgugaccaaggaagugaaa

SEQ ID NO: 14671 - RNA, 21 nt, artificial
  Oligomer
ccguauugacaggaauacuua

SEQ ID NO: 14672 - RNA, 21 nt, artificial
  Oligomer
gggucuucuacgugagcaauu

SEQ ID NO: 14673 - RNA, 21 nt, artificial
  Oligomer
cuuucugacaucagcagagaa

SEQ ID NO: 14674 - RNA, 21 nt, artificial
  Oligomer
cagaaaggagaacuauccaaa

SEQ ID NO: 14675 - RNA, 21 nt, artificial
  Oligomer
guguuguucugaaguaugaaa

SEQ ID NO: 14676 - RNA, 21 nt, artificial
  Oligomer
caugaauauauggcccgagua

SEQ ID NO: 14677 - RNA, 21 nt, artificial
  Oligomer
ccagaaguggacgcaacuuaa

SEQ ID NO: 14678 - RNA, 21 nt, artificial
  Oligomer
gguauuucugggucuuucuga

SEQ ID NO: 14679 - RNA, 21 nt, artificial
  Oligomer
cuaguuugaccucauuuguaa

SEQ ID NO: 14680 - RNA, 21 nt, artificial
  Oligomer
cagucaaagcugacuucccua

SEQ ID NO: 14681 - RNA, 21 nt, artificial
  Oligomer
gccucucugaagauuacccaa

SEQ ID NO: 14682 - RNA, 21 nt, artificial
  Oligomer
agagacuaucugauuuccuaa

SEQ ID NO: 14683 - RNA, 21 nt, artificial
  Oligomer
aguucuggaagggacuuuaga

SEQ ID NO: 14684 - RNA, 21 nt, artificial
  Oligomer
aaugagagauugagaagggaa

SEQ ID NO: 14685 - RNA, 21 nt, artificial
  Oligomer
guauggacauuuaagagugaa

SEQ ID NO: 14686 - RNA, 21 nt, artificial
  Oligomer
agaagaaaauggugcugacua

SEQ ID NO: 14687 - RNA, 21 nt, artificial
  Oligomer
caauacuaagggaagaaacaa

SEQ ID NO: 14688 - RNA, 21 nt, artificial
  Oligomer
gcaauacuaagggaagaaaca

SEQ ID NO: 14689 - RNA, 21 nt, artificial
  Oligomer
gaguugaacagcaaaagaaga

SEQ ID NO: 14690 - RNA, 21 nt, artificial
  Oligomer
cgucaaagcaguagucaagga

SEQ ID NO: 14691 - RNA, 21 nt, artificial
  Oligomer
guaagacgaaugauuuaggua

SEQ ID NO: 14692 - RNA, 21 nt, artificial
  Oligomer
aguuugacuguggccuguuaa

SEQ ID NO: 14693 - RNA, 21 nt, artificial
  Oligomer
gguguuuugaaaugcagaauu

SEQ ID NO: 14694 - RNA, 21 nt, artificial
  Oligomer
cucuaugcuguuagcagcaaa

SEQ ID NO: 14695 - RNA, 21 nt, artificial
  Oligomer
gguuggaaaauggagaagaau

SEQ ID NO: 14696 - RNA, 21 nt, artificial
  Oligomer
ccacgugaccaaggaagugaa

SEQ ID NO: 14697 - RNA, 21 nt, artificial
  Oligomer
acaucagcagagaacuggaaa

SEQ ID NO: 14698 - RNA, 21 nt, artificial
  Oligomer
caaucucuguguguuuuguaa

SEQ ID NO: 14699 - RNA, 21 nt, artificial
  Oligomer
aggaggaaagggauaguccaa

SEQ ID NO: 14700 - RNA, 21 nt, artificial
  Oligomer
ccuguuaacugguauauacau

SEQ ID NO: 14701 - RNA, 21 nt, artificial
  Oligomer
aguggaauuuuucuucagcaa

SEQ ID NO: 14702 - RNA, 21 nt, artificial
  Oligomer
ggagucuuacccugaaaucaa

SEQ ID NO: 14703 - RNA, 21 nt, artificial
  Oligomer
gcaauugaccucuucugggaa

SEQ ID NO: 14704 - RNA, 21 nt, artificial
  Oligomer
uguauaacaguguccgcagaa

SEQ ID NO: 14705 - RNA, 21 nt, artificial
  Oligomer
agauugagaagggaaagugua

SEQ ID NO: 14706 - RNA, 21 nt, artificial
  Oligomer
gaaugagagauugagaaggga

SEQ ID NO: 14707 - RNA, 21 nt, artificial
  Oligomer
gcagcaaacuggauuucaaua

SEQ ID NO: 14708 - RNA, 21 nt, artificial
  Oligomer
guguguuguucugaaguauga

SEQ ID NO: 14709 - RNA, 21 nt, artificial
  Oligomer
cgaguguguuguucugaagua

SEQ ID NO: 14710 - RNA, 21 nt, artificial
  Oligomer
cuggcaaaaggagaagaaaau

SEQ ID NO: 14711 - RNA, 21 nt, artificial
  Oligomer
ggaagugcccuggucuuacuu

SEQ ID NO: 14712 - RNA, 21 nt, artificial
  Oligomer
ccaaucucuguguguuuugua

SEQ ID NO: 14713 - RNA, 21 nt, artificial
  Oligomer
uagucaaggaggaaagggaua

SEQ ID NO: 14714 - RNA, 21 nt, artificial
  Oligomer
caaccuuuggagacccaggaa

SEQ ID NO: 14715 - RNA, 21 nt, artificial
  Oligomer
cgaaugauuuagguacgucaa

SEQ ID NO: 14716 - RNA, 21 nt, artificial
  Oligomer
gcagaauucuugaguucugga

SEQ ID NO: 14717 - RNA, 21 nt, artificial
  Oligomer
augagagauugagaagggaaa

SEQ ID NO: 14718 - RNA, 21 nt, artificial
  Oligomer
gaugcagagagagaaggagga

SEQ ID NO: 14719 - RNA, 21 nt, artificial
  Oligomer
caagaugcagagagagaagga

SEQ ID NO: 14720 - RNA, 21 nt, artificial
  Oligomer
gcuuuauagacuguaagaaga

SEQ ID NO: 14721 - RNA, 21 nt, artificial
  Oligomer
guaugaaaaagacgcuuucaa

SEQ ID NO: 14722 - RNA, 21 nt, artificial
  Oligomer
gaccaucuuugauaucacuaa

SEQ ID NO: 14723 - RNA, 21 nt, artificial
  Oligomer
cucugaagauuacccaaagaa

SEQ ID NO: 14724 - RNA, 21 nt, artificial
  Oligomer
ggcuuucacuuuugacccuaa

SEQ ID NO: 14725 - RNA, 21 nt, artificial
  Oligomer
gagggucuucuacgugagcaa

SEQ ID NO: 14726 - RNA, 21 nt, artificial
  Oligomer
aaaucuggaguugaacagcaa

SEQ ID NO: 14727 - RNA, 21 nt, artificial
  Oligomer
gcagagaacuggaaagacaua

SEQ ID NO: 14728 - RNA, 21 nt, artificial
  Oligomer
agcagagaacuggaaagacau

SEQ ID NO: 14729 - RNA, 21 nt, artificial
  Oligomer
aaguguacgcccuguauaaca

SEQ ID NO: 14730 - RNA, 21 nt, artificial
  Oligomer
gaaguggagucuuacccugaa

SEQ ID NO: 14731 - RNA, 21 nt, artificial
  Oligomer
ccauccugggccauuaccuua

SEQ ID NO: 14732 - RNA, 21 nt, artificial
  Oligomer
cagcuucaugugucucaucaa

SEQ ID NO: 14733 - RNA, 21 nt, artificial
  Oligomer
agaaaauggugcugacuauga

SEQ ID NO: 14734 - RNA, 21 nt, artificial
  Oligomer
aagggauaguccaaagacuua

SEQ ID NO: 14735 - RNA, 21 nt, artificial
  Oligomer
agaaaggagaacuauccaaaa

SEQ ID NO: 14736 - RNA, 21 nt, artificial
  Oligomer
ggcaugaacaucuuuaggaga

SEQ ID NO: 14737 - RNA, 21 nt, artificial
  Oligomer
ugaacucaaacccucuguaaa

SEQ ID NO: 14738 - RNA, 21 nt, artificial
  Oligomer
gccuguuaacugguauauaca

SEQ ID NO: 14739 - RNA, 21 nt, artificial
  Oligomer
guguuauuaaugacaaaggca

SEQ ID NO: 14740 - RNA, 21 nt, artificial
  Oligomer
gggacuuuagagaauaccagu

SEQ ID NO: 14741 - RNA, 21 nt, artificial
  Oligomer
aaguggagucuuacccugaaa

SEQ ID NO: 14742 - RNA, 21 nt, artificial
  Oligomer
agaaguggagucuuacccuga

SEQ ID NO: 14743 - RNA, 21 nt, artificial
  Oligomer
gcaucuacuggcaaaaggaga

SEQ ID NO: 14744 - RNA, 21 nt, artificial
  Oligomer
caaacucgcaucuacuggcaa

SEQ ID NO: 14745 - RNA, 21 nt, artificial
  Oligomer
uugucagcaauacuaagggaa

SEQ ID NO: 14746 - RNA, 21 nt, artificial
  Oligomer
cuauccaaaacuaauuuccuc

SEQ ID NO: 14747 - RNA, 21 nt, artificial
  Oligomer
gccagaacccagauuuccuaa

SEQ ID NO: 14748 - RNA, 21 nt, artificial
  Oligomer
ggaauauggugggcacagaag

SEQ ID NO: 14749 - RNA, 21 nt, artificial
  Oligomer
ugugauaugcugccugaccua

SEQ ID NO: 14750 - RNA, 21 nt, artificial
  Oligomer
gcaagagcauuuuccugauaa

SEQ ID NO: 14751 - RNA, 21 nt, artificial
  Oligomer
gacauuuaagagugaaucaga

SEQ ID NO: 14752 - RNA, 21 nt, artificial
  Oligomer
uggagaagaauuaaaugccau

SEQ ID NO: 14753 - RNA, 21 nt, artificial
  Oligomer
cugaagauuacccaaagaaaa

SEQ ID NO: 14754 - RNA, 21 nt, artificial
  Oligomer
gaagaaaauggugcugacuau

SEQ ID NO: 14755 - RNA, 21 nt, artificial
  Oligomer
ucagcaauacuaagggaagaa

SEQ ID NO: 14756 - RNA, 21 nt, artificial
  Oligomer
gagaggucuaacaccaacaua

SEQ ID NO: 14757 - RNA, 21 nt, artificial
  Oligomer
caaaccuugcuccuguguaaa

SEQ ID NO: 14758 - RNA, 21 nt, artificial
  Oligomer
aaucuggaguugaacagcaaa

SEQ ID NO: 14759 - RNA, 21 nt, artificial
  Oligomer
cugggauaaucacauuaucau

SEQ ID NO: 14760 - RNA, 21 nt, artificial
  Oligomer
uaagcaguaagcuaucuucaa

SEQ ID NO: 14761 - RNA, 21 nt, artificial
  Oligomer
gagguacagcagaaaggagaa

SEQ ID NO: 14762 - RNA, 21 nt, artificial
  Oligomer
caauguaaugcauaggaagua

SEQ ID NO: 14763 - RNA, 21 nt, artificial
  Oligomer
gcugugaaacuaaauccacaa

SEQ ID NO: 14764 - RNA, 21 nt, artificial
  Oligomer
aaagugcugcuggaaguagaa

SEQ ID NO: 14765 - RNA, 21 nt, artificial
  Oligomer
auacgaguguguuguucugaa

SEQ ID NO: 14766 - RNA, 21 nt, artificial
  Oligomer
caaguacugagugaacucaaa

SEQ ID NO: 14767 - RNA, 21 nt, artificial
  Oligomer
agggauaguccaaagacuuaa

SEQ ID NO: 14768 - RNA, 21 nt, artificial
  Oligomer
aaagcaguagucaaggaggaa

SEQ ID NO: 14769 - RNA, 21 nt, artificial
  Oligomer
gggaacuuccucagauggaca

SEQ ID NO: 14770 - RNA, 21 nt, artificial
  Oligomer
cgugaccaaggaagugaaaga

SEQ ID NO: 14771 - RNA, 21 nt, artificial
  Oligomer
gauacuuugucagcaauacua

SEQ ID NO: 14772 - RNA, 21 nt, artificial
  Oligomer
guacuagcaguguuucccgua

SEQ ID NO: 14773 - RNA, 21 nt, artificial
  Oligomer
acucaugacuccuuucucuaa

SEQ ID NO: 14774 - RNA, 21 nt, artificial
  Oligomer
ggaaguauggcaugaacaucu

SEQ ID NO: 14775 - RNA, 21 nt, artificial
  Oligomer
auaggaaguauggcaugaaca

SEQ ID NO: 14776 - RNA, 21 nt, artificial
  Oligomer
cuaucugauuuccuaauguca

SEQ ID NO: 14777 - RNA, 21 nt, artificial
  Oligomer
gagacuaucugauuuccuaau

SEQ ID NO: 14778 - RNA, 21 nt, artificial
  Oligomer
cuuuagagaauaccaguguua

SEQ ID NO: 14779 - RNA, 21 nt, artificial
  Oligomer
ucuggaagggacuuuagagaa

SEQ ID NO: 14780 - RNA, 21 nt, artificial
  Oligomer
cagagagagaaggaggaauga

SEQ ID NO: 14781 - RNA, 21 nt, artificial
  Oligomer
cuguugaagagcuggcacaaa

SEQ ID NO: 14782 - RNA, 21 nt, artificial
  Oligomer
cauccaaguguccauaccuca

SEQ ID NO: 14783 - RNA, 21 nt, artificial
  Oligomer
cuugcuccuguguaaaacuau

SEQ ID NO: 14784 - RNA, 21 nt, artificial
  Oligomer
acuggagggucuucuacguga

SEQ ID NO: 14785 - RNA, 21 nt, artificial
  Oligomer
ggaguugaacagcaaaagaag

SEQ ID NO: 14786 - RNA, 21 nt, artificial
  Oligomer
cuguguguuuuguaaacauca

SEQ ID NO: 14787 - RNA, 21 nt, artificial
  Oligomer
gaaacuaaauccacaaccuuu

SEQ ID NO: 14788 - RNA, 21 nt, artificial
  Oligomer
aaaagcccaauguaaugcaua

SEQ ID NO: 14789 - RNA, 21 nt, artificial
  Oligomer
gaauauggugggcacagaagu

SEQ ID NO: 14790 - RNA, 21 nt, artificial
  Oligomer
aguggagucuuacccugaaau

SEQ ID NO: 14791 - RNA, 21 nt, artificial
  Oligomer
ggauuucaauaugacaaccaa

SEQ ID NO: 14792 - RNA, 21 nt, artificial
  Oligomer
gaaacugagcucuaugcuguu

SEQ ID NO: 14793 - RNA, 21 nt, artificial
  Oligomer
uguguuguucugaaguaugaa

SEQ ID NO: 14794 - RNA, 21 nt, artificial
  Oligomer
uggucuuacuuggguccaaau

SEQ ID NO: 14795 - RNA, 21 nt, artificial
  Oligomer
uaguaacaguugugaugacua

SEQ ID NO: 14796 - RNA, 21 nt, artificial
  Oligomer
ccauuuaguaacaguugugau

SEQ ID NO: 14797 - RNA, 21 nt, artificial
  Oligomer
cucacuaugcugcuucacaaa

SEQ ID NO: 14798 - RNA, 21 nt, artificial
  Oligomer
ggacgcaacuuaagcugggau

SEQ ID NO: 14799 - RNA, 21 nt, artificial
  Oligomer
gaacuggaaagacauagccaa

SEQ ID NO: 14800 - RNA, 21 nt, artificial
  Oligomer
uccucugacauguaagacgaa

SEQ ID NO: 14801 - RNA, 21 nt, artificial
  Oligomer
ugagguacagcagaaaggaga

SEQ ID NO: 14802 - RNA, 21 nt, artificial
  Oligomer
caguuugacuguggccuguua

SEQ ID NO: 14803 - RNA, 21 nt, artificial
  Oligomer
acaaguacugagugaacucaa

SEQ ID NO: 14804 - RNA, 21 nt, artificial
  Oligomer
aggaggaaugagagauugaga

SEQ ID NO: 14805 - RNA, 21 nt, artificial
  Oligomer
gaaaauggugcugacuaugau

SEQ ID NO: 14806 - RNA, 21 nt, artificial
  Oligomer
cuacuggcaaaaggagaagaa

SEQ ID NO: 14807 - RNA, 21 nt, artificial
  Oligomer
ccaacauaagguacuagcagu

SEQ ID NO: 14808 - RNA, 21 nt, artificial
  Oligomer
uacucaugacuccuuucucua

SEQ ID NO: 14809 - RNA, 21 nt, artificial
  Oligomer
agggccuccuuagaucccuaa

SEQ ID NO: 14810 - RNA, 21 nt, artificial
  Oligomer
ugguucauauuggacugauaa

SEQ ID NO: 14811 - RNA, 21 nt, artificial
  Oligomer
ucuuuaggagacuaauggaaa

SEQ ID NO: 14812 - RNA, 21 nt, artificial
  Oligomer
agguguuuugaaaugcagaau

SEQ ID NO: 14813 - RNA, 21 nt, artificial
  Oligomer
agcagcaaacuggauuucaau

SEQ ID NO: 14814 - RNA, 21 nt, artificial
  Oligomer
agauccugaaacugagcucua

SEQ ID NO: 14815 - RNA, 21 nt, artificial
  Oligomer
cagggaacaucaccauccaag

SEQ ID NO: 14816 - RNA, 21 nt, artificial
  Oligomer
cagcagauacuuugucagcaa

SEQ ID NO: 14817 - RNA, 21 nt, artificial
  Oligomer
cagcaaaagaagacaacauuu

SEQ ID NO: 14818 - RNA, 21 nt, artificial
  Oligomer
acuuaagcugggauaaucaca

SEQ ID NO: 14819 - RNA, 21 nt, artificial
  Oligomer
cagaaguggacgcaacuuaag

SEQ ID NO: 14820 - RNA, 21 nt, artificial
  Oligomer
cucuaaaacugccuuccacaa

SEQ ID NO: 14821 - RNA, 21 nt, artificial
  Oligomer
caguguauguacuaagcagua

SEQ ID NO: 14822 - RNA, 21 nt, artificial
  Oligomer
agaucguuguuuacaguguau

SEQ ID NO: 14823 - RNA, 21 nt, artificial
  Oligomer
cuaauuuccucugacauguaa

SEQ ID NO: 14824 - RNA, 21 nt, artificial
  Oligomer
cuggaagggacuuuagagaau

SEQ ID NO: 14825 - RNA, 21 nt, artificial
  Oligomer
gauugagaagggaaaguguac

SEQ ID NO: 14826 - RNA, 21 nt, artificial
  Oligomer
ggagaagaauuaaaugccauc

SEQ ID NO: 14827 - RNA, 21 nt, artificial
  Oligomer
agaaccggaccaucuuugaua

SEQ ID NO: 14828 - RNA, 21 nt, artificial
  Oligomer
cgugagcaauuggauugucau

SEQ ID NO: 14829 - RNA, 21 nt, artificial
  Oligomer
ugacaggaauacuuaacucaa

SEQ ID NO: 14830 - RNA, 21 nt, artificial
  Oligomer
gcaguguuucccguauugaca

SEQ ID NO: 14831 - RNA, 21 nt, artificial
  Oligomer
ccuugcuccuguguaaaacua

SEQ ID NO: 14832 - RNA, 21 nt, artificial
  Oligomer
gacgcaacuuaagcugggaua

SEQ ID NO: 14833 - RNA, 21 nt, artificial
  Oligomer
cuaagguaguaacuuuccaua

SEQ ID NO: 14834 - RNA, 21 nt, artificial
  Oligomer
caaagacuuaacugguucaua

SEQ ID NO: 14835 - RNA, 21 nt, artificial
  Oligomer
cagcaagcugugaaacuaaau

SEQ ID NO: 14836 - RNA, 21 nt, artificial
  Oligomer
cuugaucaagguguuuugaaa

SEQ ID NO: 14837 - RNA, 21 nt, artificial
  Oligomer
gaggaauauggugggcacaga

SEQ ID NO: 14838 - RNA, 21 nt, artificial
  Oligomer
gcauuuuccugauaaccugcu

SEQ ID NO: 14839 - RNA, 21 nt, artificial
  Oligomer
caucaaguauggacauuuaag

SEQ ID NO: 14840 - RNA, 21 nt, artificial
  Oligomer
ugaagugacguuaucagucaa

SEQ ID NO: 14841 - RNA, 21 nt, artificial
  Oligomer
aucuggaguugaacagcaaaa

SEQ ID NO: 14842 - RNA, 21 nt, artificial
  Oligomer
uaagcugggauaaucacauua

SEQ ID NO: 14843 - RNA, 21 nt, artificial
  Oligomer
caacuuaagcugggauaauca

SEQ ID NO: 14844 - RNA, 21 nt, artificial
  Oligomer
aguagucaaggaggaaaggga

SEQ ID NO: 14845 - RNA, 21 nt, artificial
  Oligomer
caaagcaguagucaaggagga

SEQ ID NO: 14846 - RNA, 21 nt, artificial
  Oligomer
cccaguauuccauuuuuuuca

SEQ ID NO: 14847 - RNA, 21 nt, artificial
  Oligomer
gugaacucaaacccucuguaa

SEQ ID NO: 14848 - RNA, 21 nt, artificial
  Oligomer
gcugcuggaaguagaauuugu

SEQ ID NO: 14849 - RNA, 21 nt, artificial
  Oligomer
ucagcaagcugugaaacuaaa

SEQ ID NO: 14850 - RNA, 21 nt, artificial
  Oligomer
cccugaaaucaaaggauuuaa

SEQ ID NO: 14851 - RNA, 21 nt, artificial
  Oligomer
ugcaggaagugucuagaggaa

SEQ ID NO: 14852 - RNA, 21 nt, artificial
  Oligomer
cugggaacuuccucagaugga

SEQ ID NO: 14853 - RNA, 21 nt, artificial
  Oligomer
ccauuaccuuaaucucaguaa

SEQ ID NO: 14854 - RNA, 21 nt, artificial
  Oligomer
ucacaauguuucuguugaaga

SEQ ID NO: 14855 - RNA, 21 nt, artificial
  Oligomer
aaaugucgccucucugaagau

SEQ ID NO: 14856 - RNA, 21 nt, artificial
  Oligomer
agcagauacuuugucagcaau

SEQ ID NO: 14857 - RNA, 21 nt, artificial
  Oligomer
gacaggaauacuuaacucaau

SEQ ID NO: 14858 - RNA, 21 nt, artificial
  Oligomer
ggcugggauuuaaagccuuua

SEQ ID NO: 14859 - RNA, 21 nt, artificial
  Oligomer
acaucacuggagggucuucua

SEQ ID NO: 14860 - RNA, 21 nt, artificial
  Oligomer
gauggcuuuuucuccuuggua

SEQ ID NO: 14861 - RNA, 21 nt, artificial
  Oligomer
caguaagcuaucuucaaaugu

SEQ ID NO: 14862 - RNA, 21 nt, artificial
  Oligomer
acuuaacugguucauauugga

SEQ ID NO: 14863 - RNA, 21 nt, artificial
  Oligomer
uccuaaugucagaguagaaga

SEQ ID NO: 14864 - RNA, 21 nt, artificial
  Oligomer
caggucaacuucagagacuau

SEQ ID NO: 14865 - RNA, 21 nt, artificial
  Oligomer
gaauuauaaaggccagcgcca

SEQ ID NO: 14866 - RNA, 21 nt, artificial
  Oligomer
agggaggugacccgaauuaua

SEQ ID NO: 14867 - RNA, 21 nt, artificial
  Oligomer
cagggaggugacccgaauuau

SEQ ID NO: 14868 - RNA, 21 nt, artificial
  Oligomer
ggaagggacuuuagagaauac

SEQ ID NO: 14869 - RNA, 21 nt, artificial
  Oligomer
cagaauucuugaguucuggaa

SEQ ID NO: 14870 - RNA, 21 nt, artificial
  Oligomer
cuuaggugcuucuucacuuca

SEQ ID NO: 14871 - RNA, 21 nt, artificial
  Oligomer
gcccuuuacguaucugcucuu

SEQ ID NO: 14872 - RNA, 21 nt, artificial
  Oligomer
caagcaagagcauuuuccuga

SEQ ID NO: 14873 - RNA, 21 nt, artificial
  Oligomer
caaguauggacauuuaagagu

SEQ ID NO: 14874 - RNA, 21 nt, artificial
  Oligomer
gcuucaugugucucaucaagu

SEQ ID NO: 14875 - RNA, 21 nt, artificial
  Oligomer
guuggaaaauggagaagaauu

SEQ ID NO: 14876 - RNA, 21 nt, artificial
  Oligomer
ucaccucuccugguuggaaaa

SEQ ID NO: 14877 - RNA, 21 nt, artificial
  Oligomer
accuaguauaucugacuuuga

SEQ ID NO: 14878 - RNA, 21 nt, artificial
  Oligomer
cuggcugaagugacguuauca

SEQ ID NO: 14879 - RNA, 21 nt, artificial
  Oligomer
gaguguguuguucugaaguau

SEQ ID NO: 14880 - RNA, 21 nt, artificial
  Oligomer
ggcacauacgaguguguuguu

SEQ ID NO: 14881 - RNA, 21 nt, artificial
  Oligomer
caucuacuggcaaaaggagaa

SEQ ID NO: 14882 - RNA, 21 nt, artificial
  Oligomer
ccucucugaagauuacccaaa

SEQ ID NO: 14883 - RNA, 21 nt, artificial
  Oligomer
uguccauaccucaauuucuuu

SEQ ID NO: 14884 - RNA, 21 nt, artificial
  Oligomer
cuauauucucaguguagggca

SEQ ID NO: 14885 - RNA, 21 nt, artificial
  Oligomer
cuggaguugaacagcaaaaga

SEQ ID NO: 14886 - RNA, 21 nt, artificial
  Oligomer
gcugggauaaucacauuauca

SEQ ID NO: 14887 - RNA, 21 nt, artificial
  Oligomer
cucaaacccucuguaaaguaa

SEQ ID NO: 14888 - RNA, 21 nt, artificial
  Oligomer
gacaucagcagagaacuggaa

SEQ ID NO: 14889 - RNA, 21 nt, artificial
  Oligomer
cugguucauauuggacugaua

SEQ ID NO: 14890 - RNA, 21 nt, artificial
  Oligomer
acgaaugauuuagguacguca

SEQ ID NO: 14891 - RNA, 21 nt, artificial
  Oligomer
gauuuuaugcugcuguuuaca

SEQ ID NO: 14892 - RNA, 21 nt, artificial
  Oligomer
aggucccaccuccauuugcaa

SEQ ID NO: 14893 - RNA, 21 nt, artificial
  Oligomer
agggaaaguguacgcccugua

SEQ ID NO: 14894 - RNA, 21 nt, artificial
  Oligomer
gagcauuuuccugauaaccug

SEQ ID NO: 14895 - RNA, 21 nt, artificial
  Oligomer
agagcauuuuccugauaaccu

SEQ ID NO: 14896 - RNA, 21 nt, artificial
  Oligomer
aagagugaaucagaccuucaa

SEQ ID NO: 14897 - RNA, 21 nt, artificial
  Oligomer
caguuucccaagauccugaaa

SEQ ID NO: 14898 - RNA, 21 nt, artificial
  Oligomer
cccuacaccuaguauaucuga

SEQ ID NO: 14899 - RNA, 21 nt, artificial
  Oligomer
aaaagacgcuuucaagcggga

SEQ ID NO: 14900 - RNA, 21 nt, artificial
  Oligomer
uaauaaccucuccauugugau

SEQ ID NO: 14901 - RNA, 21 nt, artificial
  Oligomer
cuaauaaccucuccauuguga

SEQ ID NO: 14902 - RNA, 21 nt, artificial
  Oligomer
guugaagagcuggcacaaacu

SEQ ID NO: 14903 - RNA, 21 nt, artificial
  Oligomer
gaccaaggaagugaaagaagu

SEQ ID NO: 14904 - RNA, 21 nt, artificial
  Oligomer
cuuacuuggguccaaauuguu

SEQ ID NO: 14905 - RNA, 21 nt, artificial
  Oligomer
caguguuucccguauugacag

SEQ ID NO: 14906 - RNA, 21 nt, artificial
  Oligomer
cuuccacaauucacuagacca

SEQ ID NO: 14907 - RNA, 21 nt, artificial
  Oligomer
cucaugacuccuuucucuaaa

SEQ ID NO: 14908 - RNA, 21 nt, artificial
  Oligomer
agaacuggaaagacauagcca

SEQ ID NO: 14909 - RNA, 21 nt, artificial
  Oligomer
aagcaguagucaaggaggaaa

SEQ ID NO: 14910 - RNA, 21 nt, artificial
  Oligomer
aguauggcaugaacaucuuua

SEQ ID NO: 14911 - RNA, 21 nt, artificial
  Oligomer
aaguauggcaugaacaucuuu

SEQ ID NO: 14912 - RNA, 21 nt, artificial
  Oligomer
uaggaaguauggcaugaacau

SEQ ID NO: 14913 - RNA, 21 nt, artificial
  Oligomer
gcccaauguaaugcauaggaa

SEQ ID NO: 14914 - RNA, 21 nt, artificial
  Oligomer
ccuaaugucagaguagaagau

SEQ ID NO: 14915 - RNA, 21 nt, artificial
  Oligomer
cagagacuaucugauuuccua

SEQ ID NO: 14916 - RNA, 21 nt, artificial
  Oligomer
uucagcaagcugugaaacuaa

SEQ ID NO: 14917 - RNA, 21 nt, artificial
  Oligomer
cuggaauacaaccaagcaaga

SEQ ID NO: 14918 - RNA, 21 nt, artificial
  Oligomer
aacuggaauacaaccaagcaa

SEQ ID NO: 14919 - RNA, 21 nt, artificial
  Oligomer
ccaagauccugaaacugagcu

SEQ ID NO: 14920 - RNA, 21 nt, artificial
  Oligomer
cuuuauagacuguaagaagag

SEQ ID NO: 14921 - RNA, 21 nt, artificial
  Oligomer
agcaauacuaagggaagaaac

SEQ ID NO: 14922 - RNA, 21 nt, artificial
  Oligomer
guagggcagagaggucuaaca

SEQ ID NO: 14923 - RNA, 21 nt, artificial
  Oligomer
cccauggcuuuagcuaccuca

SEQ ID NO: 14924 - RNA, 21 nt, artificial
  Oligomer
aucugaaaaucuggaguugaa

SEQ ID NO: 14925 - RNA, 21 nt, artificial
  Oligomer
ccuugguauuucugggucuuu

SEQ ID NO: 14926 - RNA, 21 nt, artificial
  Oligomer
gagaucguuguuuacagugua

SEQ ID NO: 14927 - RNA, 21 nt, artificial
  Oligomer
gcucuuucccuuuaucaguuu

SEQ ID NO: 14928 - RNA, 21 nt, artificial
  Oligomer
cgccagaacccagauuuccua

SEQ ID NO: 14929 - RNA, 21 nt, artificial
  Oligomer
uggaagggacuuuagagaaua

SEQ ID NO: 14930 - RNA, 21 nt, artificial
  Oligomer
ccuuuacguaucugcucuuag

SEQ ID NO: 14931 - RNA, 21 nt, artificial
  Oligomer
ugaaaagaucugaagguccca

SEQ ID NO: 14932 - RNA, 21 nt, artificial
  Oligomer
gaggaaugagagauugagaag

SEQ ID NO: 14933 - RNA, 21 nt, artificial
  Oligomer
agagaacaucucagaagugga

SEQ ID NO: 14934 - RNA, 21 nt, artificial
  Oligomer
uggacauuuaagagugaauca

SEQ ID NO: 14935 - RNA, 21 nt, artificial
  Oligomer
gacuguaagaagagaacaucu

SEQ ID NO: 14936 - RNA, 21 nt, artificial
  Oligomer
cauacgaguguguuguucuga

SEQ ID NO: 14937 - RNA, 21 nt, artificial
  Oligomer
aucugacgagggcacauacga

SEQ ID NO: 14938 - RNA, 21 nt, artificial
  Oligomer
ggucuuucucacuucuguuca

SEQ ID NO: 14939 - RNA, 21 nt, artificial
  Oligomer
cugaaaaucuggaguugaaca

SEQ ID NO: 14940 - RNA, 21 nt, artificial
  Oligomer
agcaguaagcuaucuucaaau

SEQ ID NO: 14941 - RNA, 21 nt, artificial
  Oligomer
gguacgucaaagcaguaguca

SEQ ID NO: 14942 - RNA, 21 nt, artificial
  Oligomer
uuuagguacgucaaagcagua

SEQ ID NO: 14943 - RNA, 21 nt, artificial
  Oligomer
gauuuagguacgucaaagcag

SEQ ID NO: 14944 - RNA, 21 nt, artificial
  Oligomer
ugguguuuacccaguauucca

SEQ ID NO: 14945 - RNA, 21 nt, artificial
  Oligomer
guuuacaaaagcccaauguaa

SEQ ID NO: 14946 - RNA, 21 nt, artificial
  Oligomer
cccaccuugcccuuuacguau

SEQ ID NO: 14947 - RNA, 21 nt, artificial
  Oligomer
aguauggacauuuaagaguga

SEQ ID NO: 14948 - RNA, 21 nt, artificial
  Oligomer
gcaaacuggauuucaauauga

SEQ ID NO: 14949 - RNA, 21 nt, artificial
  Oligomer
caagaaccggaccaucuuuga

SEQ ID NO: 14950 - RNA, 21 nt, artificial
  Oligomer
ggaagugaaagaaguggcaac

SEQ ID NO: 14951 - RNA, 21 nt, artificial
  Oligomer
ggcuggucuuucucacuucug

SEQ ID NO: 14952 - RNA, 21 nt, artificial
  Oligomer
cuuuugacccuaagcaucuga

SEQ ID NO: 14953 - RNA, 21 nt, artificial
  Oligomer
gguccaaauuguuggcuuuca

SEQ ID NO: 14954 - RNA, 21 nt, artificial
  Oligomer
ccucacuaugcugcuucacaa

SEQ ID NO: 14955 - RNA, 21 nt, artificial
  Oligomer
cugggauuuaaagccuuuaga

SEQ ID NO: 14956 - RNA, 21 nt, artificial
  Oligomer
caacauuucucaaaugcacau

SEQ ID NO: 14957 - RNA, 21 nt, artificial
  Oligomer
gaacagcaaaagaagacaaca

SEQ ID NO: 14958 - RNA, 21 nt, artificial
  Oligomer
ugacaucagcagagaacugga

SEQ ID NO: 14959 - RNA, 21 nt, artificial
  Oligomer
acucaaacccucuguaaagua

SEQ ID NO: 14960 - RNA, 21 nt, artificial
  Oligomer
gggucuuucugacaucagcag

SEQ ID NO: 14961 - RNA, 21 nt, artificial
  Oligomer
ucuucaaaugucuaagguagu

SEQ ID NO: 14962 - RNA, 21 nt, artificial
  Oligomer
guguuuacccaguauuccauu

SEQ ID NO: 14963 - RNA, 21 nt, artificial
  Oligomer
cugcuguuuacaaaagcccaa

SEQ ID NO: 14964 - RNA, 21 nt, artificial
  Oligomer
aguagaagauuuuaugcugcu

SEQ ID NO: 14965 - RNA, 21 nt, artificial
  Oligomer
uguggccuguuaacugguaua

SEQ ID NO: 14966 - RNA, 21 nt, artificial
  Oligomer
cuuccucagauggacaagauu

SEQ ID NO: 14967 - RNA, 21 nt, artificial
  Oligomer
ugcuguuagcagcaaacugga

SEQ ID NO: 14968 - RNA, 21 nt, artificial
  Oligomer
gcucuaugcuguuagcagcaa

SEQ ID NO: 14969 - RNA, 21 nt, artificial
  Oligomer
cucuccugguuggaaaaugga

SEQ ID NO: 14970 - RNA, 21 nt, artificial
  Oligomer
cugacuucccuacaccuagua

SEQ ID NO: 14971 - RNA, 21 nt, artificial
  Oligomer
uacuggcaaaaggagaagaaa

SEQ ID NO: 14972 - RNA, 21 nt, artificial
  Oligomer
acccuaagcaucugaagccau

SEQ ID NO: 14973 - RNA, 21 nt, artificial
  Oligomer
caaacccucuguaaaguaaca

SEQ ID NO: 14974 - RNA, 21 nt, artificial
  Oligomer
gcuccuguguaaaacuauauu

SEQ ID NO: 14975 - RNA, 21 nt, artificial
  Oligomer
gcaaaagaagacaacauuucu

SEQ ID NO: 14976 - RNA, 21 nt, artificial
  Oligomer
gucuaagguaguaacuuucca

SEQ ID NO: 14977 - RNA, 21 nt, artificial
  Oligomer
acuaauuuccucugacaugua

SEQ ID NO: 14978 - RNA, 21 nt, artificial
  Oligomer
cuuuaggagacuaauggaaau

SEQ ID NO: 14979 - RNA, 21 nt, artificial
  Oligomer
agugcugcuggaaguagaauu

SEQ ID NO: 14980 - RNA, 21 nt, artificial
  Oligomer
cucuggugcucuuucccuuua

SEQ ID NO: 14981 - RNA, 21 nt, artificial
  Oligomer
aaguggaauuuuucuucagca

SEQ ID NO: 14982 - RNA, 21 nt, artificial
  Oligomer
ccaccuccauuugcaauugac

SEQ ID NO: 14983 - RNA, 21 nt, artificial
  Oligomer
gagagauugagaagggaaagu

SEQ ID NO: 14984 - RNA, 21 nt, artificial
  Oligomer
gcuguuagcagcaaacuggau

SEQ ID NO: 14985 - RNA, 21 nt, artificial
  Oligomer
gauccugaaacugagcucuau

SEQ ID NO: 14986 - RNA, 21 nt, artificial
  Oligomer
gacuucccuacaccuaguaua

SEQ ID NO: 14987 - RNA, 21 nt, artificial
  Oligomer
gaaguaugaaaaagacgcuuu

SEQ ID NO: 14988 - RNA, 21 nt, artificial
  Oligomer
gauuacccaaagaaaaaguga

SEQ ID NO: 14989 - RNA, 21 nt, artificial
  Oligomer
cgaguacaagaaccggaccau

SEQ ID NO: 14990 - RNA, 21 nt, artificial
  Oligomer
ugaccaaggaagugaaagaag

SEQ ID NO: 14991 - RNA, 21 nt, artificial
  Oligomer
ccuggucuuacuuggguccaa

SEQ ID NO: 14992 - RNA, 21 nt, artificial
  Oligomer
uaagggaagaaacaaaguuga

SEQ ID NO: 14993 - RNA, 21 nt, artificial
  Oligomer
acgugagcaauuggauuguca

SEQ ID NO: 14994 - RNA, 21 nt, artificial
  Oligomer
ucuucuacgugagcaauugga

SEQ ID NO: 14995 - RNA, 21 nt, artificial
  Oligomer
ccacauggcugggauuuaaag

SEQ ID NO: 14996 - RNA, 21 nt, artificial
  Oligomer
auuucucaaaugcacaucuca

SEQ ID NO: 14997 - RNA, 21 nt, artificial
  Oligomer
agacaacauuucucaaaugca

SEQ ID NO: 14998 - RNA, 21 nt, artificial
  Oligomer
cacaauucacuagaccagaag

SEQ ID NO: 14999 - RNA, 21 nt, artificial
  Oligomer
ucucuaaaacugccuuccaca

SEQ ID NO: 15000 - RNA, 21 nt, artificial
  Oligomer
cagcagagaacuggaaagaca

SEQ ID NO: 15001 - RNA, 21 nt, artificial
  Oligomer
cccuccaaucucuguguguuu

SEQ ID NO: 15002 - RNA, 21 nt, artificial
  Oligomer
ugacauguaagacgaaugauu

SEQ ID NO: 15003 - RNA, 21 nt, artificial
  Oligomer
cugacauguaagacgaaugau

SEQ ID NO: 15004 - RNA, 21 nt, artificial
  Oligomer
gaacaucuuuaggagacuaau

SEQ ID NO: 15005 - RNA, 21 nt, artificial
  Oligomer
auggcaugaacaucuuuagga

SEQ ID NO: 15006 - RNA, 21 nt, artificial
  Oligomer
gaaguauggcaugaacaucuu

SEQ ID NO: 15007 - RNA, 21 nt, artificial
  Oligomer
agcugugaaacuaaauccaca

SEQ ID NO: 15008 - RNA, 21 nt, artificial
  Oligomer
auuuguccaauaacaggucaa

SEQ ID NO: 15009 - RNA, 21 nt, artificial
  Oligomer
gcuggaaguagaauuugucca

SEQ ID NO: 15010 - RNA, 21 nt, artificial
  Oligomer
ggcaaagugcugcuggaagua

SEQ ID NO: 15011 - RNA, 21 nt, artificial
  Oligomer
gacuguggccuguuaacuggu

SEQ ID NO: 15012 - RNA, 21 nt, artificial
  Oligomer
ucuugaguucuggaagggacu

SEQ ID NO: 15013 - RNA, 21 nt, artificial
  Oligomer
agcucuggugaccuugaucaa

SEQ ID NO: 15014 - RNA, 21 nt, artificial
  Oligomer
gggcugaaaagaucugaaggu

SEQ ID NO: 15015 - RNA, 21 nt, artificial
  Oligomer
gggaaaguguacgcccuguau

SEQ ID NO: 15016 - RNA, 21 nt, artificial
  Oligomer
ugcagagagagaaggaggaau

SEQ ID NO: 15017 - RNA, 21 nt, artificial
  Oligomer
ugauaugcugccugaccuacu

SEQ ID NO: 15018 - RNA, 21 nt, artificial
  Oligomer
uagcagcaaacuggauuucaa

SEQ ID NO: 15019 - RNA, 21 nt, artificial
  Oligomer
acaguuucccaagauccugaa

SEQ ID NO: 15020 - RNA, 21 nt, artificial
  Oligomer
acaccuaguauaucugacuuu

SEQ ID NO: 15021 - RNA, 21 nt, artificial
  Oligomer
auauauggcccgaguacaaga

SEQ ID NO: 15022 - RNA, 21 nt, artificial
  Oligomer
ggagaagaaaauggugcugac

SEQ ID NO: 15023 - RNA, 21 nt, artificial
  Oligomer
uuuugacccuaagcaucugaa

SEQ ID NO: 15024 - RNA, 21 nt, artificial
  Oligomer
gcacaucucauggcagcuaag

SEQ ID NO: 15025 - RNA, 21 nt, artificial
  Oligomer
acaacauuucucaaaugcaca

SEQ ID NO: 15026 - RNA, 21 nt, artificial
  Oligomer
gacauagccaacugcuguuca

SEQ ID NO: 15027 - RNA, 21 nt, artificial
  Oligomer
aggaaagggauaguccaaaga

SEQ ID NO: 15028 - RNA, 21 nt, artificial
  Oligomer
gguguuuacccaguauuccau

SEQ ID NO: 15029 - RNA, 21 nt, artificial
  Oligomer
caucuuuaggagacuaaugga

SEQ ID NO: 15030 - RNA, 21 nt, artificial
  Oligomer
acaaaagcccaauguaaugca

SEQ ID NO: 15031 - RNA, 21 nt, artificial
  Oligomer
cuggaaguagaauuuguccaa

SEQ ID NO: 15032 - RNA, 21 nt, artificial
  Oligomer
cuguggccuguuaacugguau

SEQ ID NO: 15033 - RNA, 21 nt, artificial
  Oligomer
uuuucuucagcaagcugugaa

SEQ ID NO: 15034 - RNA, 21 nt, artificial
  Oligomer
ggucccaccuccauuugcaau

SEQ ID NO: 15035 - RNA, 21 nt, artificial
  Oligomer
gagauugagaagggaaagugu

SEQ ID NO: 15036 - RNA, 21 nt, artificial
  Oligomer
ggccauuaccuuaaucucagu

SEQ ID NO: 15037 - RNA, 21 nt, artificial
  Oligomer
gaccuucaacuggaauacaac

SEQ ID NO: 15038 - RNA, 21 nt, artificial
  Oligomer
cauugcuuuauagacuguaag

SEQ ID NO: 15039 - RNA, 21 nt, artificial
  Oligomer
ggcugaagugacguuaucagu

SEQ ID NO: 15040 - RNA, 21 nt, artificial
  Oligomer
ugaauauauggcccgaguaca

SEQ ID NO: 15041 - RNA, 21 nt, artificial
  Oligomer
aggagaagaaaauggugcuga

SEQ ID NO: 15042 - RNA, 21 nt, artificial
  Oligomer
uggucacaauguuucuguuga

SEQ ID NO: 15043 - RNA, 21 nt, artificial
  Oligomer
ccucaauuucuuucagcucuu

SEQ ID NO: 15044 - RNA, 21 nt, artificial
  Oligomer
ggaacaucaccauccaagugu

SEQ ID NO: 15045 - RNA, 21 nt, artificial
  Oligomer
auuccuguauucuacagcaga

SEQ ID NO: 15046 - RNA, 21 nt, artificial
  Oligomer
cauaagguacuagcaguguuu

SEQ ID NO: 15047 - RNA, 21 nt, artificial
  Oligomer
guguagggcagagaggucuaa

SEQ ID NO: 15048 - RNA, 21 nt, artificial
  Oligomer
ccuguguaaaacuauauucuc

SEQ ID NO: 15049 - RNA, 21 nt, artificial
  Oligomer
cgcaacuuaagcugggauaau

SEQ ID NO: 15050 - RNA, 21 nt, artificial
  Oligomer
cucuguguguuuuguaaacau

SEQ ID NO: 15051 - RNA, 21 nt, artificial
  Oligomer
ggucuuucugacaucagcaga

SEQ ID NO: 15052 - RNA, 21 nt, artificial
  Oligomer
cuaagauggcuuuuucuccuu

SEQ ID NO: 15053 - RNA, 21 nt, artificial
  Oligomer
ccuccuuagaucccuaagaug

SEQ ID NO: 15054 - RNA, 21 nt, artificial
  Oligomer
ggaacacccuccaaucucugu

SEQ ID NO: 15055 - RNA, 21 nt, artificial
  Oligomer
guacagcagaaaggagaacua

SEQ ID NO: 15056 - RNA, 21 nt, artificial
  Oligomer
cagaguagaagauuuuaugcu

SEQ ID NO: 15057 - RNA, 21 nt, artificial
  Oligomer
aggaagugucuagaggaauau

SEQ ID NO: 15058 - RNA, 21 nt, artificial
  Oligomer
uugcaggaagugucuagagga

SEQ ID NO: 15059 - RNA, 21 nt, artificial
  Oligomer
gagaaggaggaaugagagauu

SEQ ID NO: 15060 - RNA, 21 nt, artificial
  Oligomer
ugguuggaaaauggagaagaa

SEQ ID NO: 15061 - RNA, 21 nt, artificial
  Oligomer
cuuucucacuucuguucaggu

SEQ ID NO: 15062 - RNA, 21 nt, artificial
  Oligomer
aguguagggcagagaggucua

SEQ ID NO: 15063 - RNA, 21 nt, artificial
  Oligomer
cuaccucacuaugcugcuuca

SEQ ID NO: 15064 - RNA, 21 nt, artificial
  Oligomer
acaggucaacuucagagacua

SEQ ID NO: 15065 - RNA, 21 nt, artificial
  Oligomer
aagugcugcuggaaguagaau

SEQ ID NO: 15066 - RNA, 21 nt, artificial
  Oligomer
ucuggugcucuuucccuuuau

SEQ ID NO: 15067 - RNA, 21 nt, artificial
  Oligomer
agugaacucaaacccucugua

SEQ ID NO: 15068 - RNA, 21 nt, artificial
  Oligomer
guggaauuuuucuucagcaag

SEQ ID NO: 15069 - RNA, 21 nt, artificial
  Oligomer
agagaaggaggaaugagagau

SEQ ID NO: 15070 - RNA, 21 nt, artificial
  Oligomer
accuuaaucucaguaaaugga

SEQ ID NO: 15071 - RNA, 21 nt, artificial
  Oligomer
gggccauuaccuuaaucucag

SEQ ID NO: 15072 - RNA, 21 nt, artificial
  Oligomer
ccuucaacuggaauacaacca

SEQ ID NO: 15073 - RNA, 21 nt, artificial
  Oligomer
caaccacagcuucaugugucu

SEQ ID NO: 15074 - RNA, 21 nt, artificial
  Oligomer
cagcaaacuggauuucaauau

SEQ ID NO: 15075 - RNA, 21 nt, artificial
  Oligomer
caacacaacaguuucccaaga

SEQ ID NO: 15076 - RNA, 21 nt, artificial
  Oligomer
acgaguguguuguucugaagu

SEQ ID NO: 15077 - RNA, 21 nt, artificial
  Oligomer
gaaccggaccaucuuugauau

SEQ ID NO: 15078 - RNA, 21 nt, artificial
  Oligomer
aguacaagaaccggaccaucu

SEQ ID NO: 15079 - RNA, 21 nt, artificial
  Oligomer
uguugaagagcuggcacaaac

SEQ ID NO: 15080 - RNA, 21 nt, artificial
  Oligomer
uucuguugaagagcuggcaca

SEQ ID NO: 15081 - RNA, 21 nt, artificial
  Oligomer
augucgccucucugaagauua

SEQ ID NO: 15082 - RNA, 21 nt, artificial
  Oligomer
acaaaccuugcuccuguguaa

SEQ ID NO: 15083 - RNA, 21 nt, artificial
  Oligomer
acagcaaaagaagacaacauu

SEQ ID NO: 15084 - RNA, 21 nt, artificial
  Oligomer
aguugaacagcaaaagaagac

SEQ ID NO: 15085 - RNA, 21 nt, artificial
  Oligomer
agaccagaaguggacgcaacu

SEQ ID NO: 15086 - RNA, 21 nt, artificial
  Oligomer
ccaacugcuguucauguuacu

SEQ ID NO: 15087 - RNA, 21 nt, artificial
  Oligomer
cuucaaaugucuaagguagua

SEQ ID NO: 15088 - RNA, 21 nt, artificial
  Oligomer
guguauguacuaagcaguaag

SEQ ID NO: 15089 - RNA, 21 nt, artificial
  Oligomer
aauggcuuuaugcuaguuuga

SEQ ID NO: 15090 - RNA, 21 nt, artificial
  Oligomer
ggauaguccaaagacuuaacu

SEQ ID NO: 15091 - RNA, 21 nt, artificial
  Oligomer
ccaaaacuaauuuccucugac

SEQ ID NO: 15092 - RNA, 21 nt, artificial
  Oligomer
aaaggagaacuauccaaaacu

SEQ ID NO: 15093 - RNA, 21 nt, artificial
  Oligomer
ggugcucuuucccuuuaucag

SEQ ID NO: 15094 - RNA, 21 nt, artificial
  Oligomer
aaguagcucuggugaccuuga

SEQ ID NO: 15095 - RNA, 21 nt, artificial
  Oligomer
aggugcuucuucacuucaguu

SEQ ID NO: 15096 - RNA, 21 nt, artificial
  Oligomer
cccaccuccauuugcaauuga

SEQ ID NO: 15097 - RNA, 21 nt, artificial
  Oligomer
ccugggccauuaccuuaaucu

SEQ ID NO: 15098 - RNA, 21 nt, artificial
  Oligomer
cuucaacuggaauacaaccaa

SEQ ID NO: 15099 - RNA, 21 nt, artificial
  Oligomer
gagugaaucagaccuucaacu

SEQ ID NO: 15100 - RNA, 21 nt, artificial
  Oligomer
acagcuucaugugucucauca

SEQ ID NO: 15101 - RNA, 21 nt, artificial
  Oligomer
ugacaaccaaccacagcuuca

SEQ ID NO: 15102 - RNA, 21 nt, artificial
  Oligomer
uagacuguaagaagagaacau

SEQ ID NO: 15103 - RNA, 21 nt, artificial
  Oligomer
gcaaaaggagaagaaaauggu

SEQ ID NO: 15104 - RNA, 21 nt, artificial
  Oligomer
uguccuguggucacaauguuu

SEQ ID NO: 15105 - RNA, 21 nt, artificial
  Oligomer
aggaagugaaagaaguggcaa

SEQ ID NO: 15106 - RNA, 21 nt, artificial
  Oligomer
gcuggucuuucucacuucugu

SEQ ID NO: 15107 - RNA, 21 nt, artificial
  Oligomer
uccuguauucuacagcagaua

SEQ ID NO: 15108 - RNA, 21 nt, artificial
  Oligomer
gcagagaggucuaacaccaac

SEQ ID NO: 15109 - RNA, 21 nt, artificial
  Oligomer
caucugaaaaucuggaguuga

SEQ ID NO: 15110 - RNA, 21 nt, artificial
  Oligomer
accagaaguggacgcaacuua

SEQ ID NO: 15111 - RNA, 21 nt, artificial
  Oligomer
cucuauugcugcucucucacu

SEQ ID NO: 15112 - RNA, 21 nt, artificial
  Oligomer
uuuccuaaugucagaguagaa

SEQ ID NO: 15113 - RNA, 21 nt, artificial
  Oligomer
cauauauaugucaggcaaagu

SEQ ID NO: 15114 - RNA, 21 nt, artificial
  Oligomer
uuuauaauucgggucaccucc

SEQ ID NO: 15115 - RNA, 21 nt, artificial
  Oligomer
ucugcauuucaaaacaccuug

SEQ ID NO: 15116 - RNA, 21 nt, artificial
  Oligomer
uuugacguaccuaaaucauuc

SEQ ID NO: 15117 - RNA, 21 nt, artificial
  Oligomer
uuaguuuuggauaguucuccu

SEQ ID NO: 15118 - RNA, 21 nt, artificial
  Oligomer
uucucaaucucucauuccucc

SEQ ID NO: 15119 - RNA, 21 nt, artificial
  Oligomer
uugguguuagaccucucugcc

SEQ ID NO: 15120 - RNA, 21 nt, artificial
  Oligomer
ucaaucucucauuccuccuuc

SEQ ID NO: 15121 - RNA, 21 nt, artificial
  Oligomer
auuaguuuuggauaguucucc

SEQ ID NO: 15122 - RNA, 21 nt, artificial
  Oligomer
uuucuucccuuaguauugcug

SEQ ID NO: 15123 - RNA, 21 nt, artificial
  Oligomer
uagugauaucaaagauggucc

SEQ ID NO: 15124 - RNA, 21 nt, artificial
  Oligomer
uuuggacuaucccuuuccucc

SEQ ID NO: 15125 - RNA, 21 nt, artificial
  Oligomer
uauuggacaaauucuacuucc

SEQ ID NO: 15126 - RNA, 21 nt, artificial
  Oligomer
uuauacagggcguacacuuuc

SEQ ID NO: 15127 - RNA, 21 nt, artificial
  Oligomer
uuggauggugauguucccugc

SEQ ID NO: 15128 - RNA, 21 nt, artificial
  Oligomer
uuuaaaucccagccauguggc

SEQ ID NO: 15129 - RNA, 21 nt, artificial
  Oligomer
ucucucauuccuccuucucuc

SEQ ID NO: 15130 - RNA, 21 nt, artificial
  Oligomer
uuccauuuacugagauuaagg

SEQ ID NO: 15131 - RNA, 21 nt, artificial
  Oligomer
uuguccaucugaggaaguucc

SEQ ID NO: 15132 - RNA, 21 nt, artificial
  Oligomer
uuggauaguucuccuuucugc

SEQ ID NO: 15133 - RNA, 21 nt, artificial
  Oligomer
uuguacucgggccauauauuc

SEQ ID NO: 15134 - RNA, 21 nt, artificial
  Oligomer
uauugcugacaaaguaucugc

SEQ ID NO: 15135 - RNA, 21 nt, artificial
  Oligomer
uucaaaacaccuugaucaagg

SEQ ID NO: 15136 - RNA, 21 nt, artificial
  Oligomer
uucagagaggcgacauuuccc

SEQ ID NO: 15137 - RNA, 21 nt, artificial
  Oligomer
uucuggucuagugaauugugg

SEQ ID NO: 15138 - RNA, 21 nt, artificial
  Oligomer
auuaucaguccaauaugaacc

SEQ ID NO: 15139 - RNA, 21 nt, artificial
  Oligomer
uuauaauucgggucaccuccc

SEQ ID NO: 15140 - RNA, 21 nt, artificial
  Oligomer
uauacagggcguacacuuucc

SEQ ID NO: 15141 - RNA, 21 nt, artificial
  Oligomer
ucucauuccuccuucucucuc

SEQ ID NO: 15142 - RNA, 21 nt, artificial
  Oligomer
uuugacugauaacgucacuuc

SEQ ID NO: 15143 - RNA, 21 nt, artificial
  Oligomer
uugacuacugcuuugacguac

SEQ ID NO: 15144 - RNA, 21 nt, artificial
  Oligomer
uucugugcccaccauauuccu

SEQ ID NO: 15145 - RNA, 21 nt, artificial
  Oligomer
uuaaguauuccugucaauacg

SEQ ID NO: 15146 - RNA, 21 nt, artificial
  Oligomer
uucuuuugcuguucaacucca

SEQ ID NO: 15147 - RNA, 21 nt, artificial
  Oligomer
uuugauuucaggguaagacuc

SEQ ID NO: 15148 - RNA, 21 nt, artificial
  Oligomer
uucaaagucagauauacuagg

SEQ ID NO: 15149 - RNA, 21 nt, artificial
  Oligomer
uaaagaaacgguucaacuuug

SEQ ID NO: 15150 - RNA, 21 nt, artificial
  Oligomer
uuuuacacaggagcaagguuu

SEQ ID NO: 15151 - RNA, 21 nt, artificial
  Oligomer
ucugaaguugaccuguuauug

SEQ ID NO: 15152 - RNA, 21 nt, artificial
  Oligomer
auuccucuagacacuuccugc

SEQ ID NO: 15153 - RNA, 21 nt, artificial
  Oligomer
uuguauuccaguugaaggucu

SEQ ID NO: 15154 - RNA, 21 nt, artificial
  Oligomer
ugucagaggaaauuaguuuug

SEQ ID NO: 15155 - RNA, 21 nt, artificial
  Oligomer
uucaacagaaacauugugacc

SEQ ID NO: 15156 - RNA, 21 nt, artificial
  Oligomer
uuggucacguggauaacaccu

SEQ ID NO: 15157 - RNA, 21 nt, artificial
  Oligomer
uacaaaugaggucaaacuagc

SEQ ID NO: 15158 - RNA, 21 nt, artificial
  Oligomer
uuagucuccuaaagauguuca

SEQ ID NO: 15159 - RNA, 21 nt, artificial
  Oligomer
ucuacuuccagcagcacuuug

SEQ ID NO: 15160 - RNA, 21 nt, artificial
  Oligomer
uucugcauuucaaaacaccuu

SEQ ID NO: 15161 - RNA, 21 nt, artificial
  Oligomer
uucaacuuuguuucuucccuu

SEQ ID NO: 15162 - RNA, 21 nt, artificial
  Oligomer
uuuuagagaaaggagucauga

SEQ ID NO: 15163 - RNA, 21 nt, artificial
  Oligomer
uuauguugguguuagaccucu

SEQ ID NO: 15164 - RNA, 21 nt, artificial
  Oligomer
uguugguguuagaccucucug

SEQ ID NO: 15165 - RNA, 21 nt, artificial
  Oligomer
uucaugccauacuuccuaugc

SEQ ID NO: 15166 - RNA, 21 nt, artificial
  Oligomer
uauuccucuagacacuuccug

SEQ ID NO: 15167 - RNA, 21 nt, artificial
  Oligomer
uuaagguaauggcccaggaug

SEQ ID NO: 15168 - RNA, 21 nt, artificial
  Oligomer
uuccaguugaaggucugauuc

SEQ ID NO: 15169 - RNA, 21 nt, artificial
  Oligomer
uuuucuucuccuuuugccagu

SEQ ID NO: 15170 - RNA, 21 nt, artificial
  Oligomer
uuucacuuccuuggucacgug

SEQ ID NO: 15171 - RNA, 21 nt, artificial
  Oligomer
uaaguauuccugucaauacgg

SEQ ID NO: 15172 - RNA, 21 nt, artificial
  Oligomer
aauugcucacguagaagaccc

SEQ ID NO: 15173 - RNA, 21 nt, artificial
  Oligomer
uucucugcugaugucagaaag

SEQ ID NO: 15174 - RNA, 21 nt, artificial
  Oligomer
uuuggauaguucuccuuucug

SEQ ID NO: 15175 - RNA, 21 nt, artificial
  Oligomer
uuucauacuucagaacaacac

SEQ ID NO: 15176 - RNA, 21 nt, artificial
  Oligomer
uacucgggccauauauucaug

SEQ ID NO: 15177 - RNA, 21 nt, artificial
  Oligomer
uuaaguugcguccacuucugg

SEQ ID NO: 15178 - RNA, 21 nt, artificial
  Oligomer
ucagaaagacccagaaauacc

SEQ ID NO: 15179 - RNA, 21 nt, artificial
  Oligomer
uuacaaaugaggucaaacuag

SEQ ID NO: 15180 - RNA, 21 nt, artificial
  Oligomer
uagggaagucagcuuugacug

SEQ ID NO: 15181 - RNA, 21 nt, artificial
  Oligomer
uuggguaaucuucagagaggc

SEQ ID NO: 15182 - RNA, 21 nt, artificial
  Oligomer
uuaggaaaucagauagucucu

SEQ ID NO: 15183 - RNA, 21 nt, artificial
  Oligomer
ucuaaagucccuuccagaacu

SEQ ID NO: 15184 - RNA, 21 nt, artificial
  Oligomer
uucccuucucaaucucucauu

SEQ ID NO: 15185 - RNA, 21 nt, artificial
  Oligomer
uucacucuuaaauguccauac

SEQ ID NO: 15186 - RNA, 21 nt, artificial
  Oligomer
uagucagcaccauuuucuucu

SEQ ID NO: 15187 - RNA, 21 nt, artificial
  Oligomer
uuguuucuucccuuaguauug

SEQ ID NO: 15188 - RNA, 21 nt, artificial
  Oligomer
uguuucuucccuuaguauugc

SEQ ID NO: 15189 - RNA, 21 nt, artificial
  Oligomer
ucuucuuuugcuguucaacuc

SEQ ID NO: 15190 - RNA, 21 nt, artificial
  Oligomer
uccuugacuacugcuuugacg

SEQ ID NO: 15191 - RNA, 21 nt, artificial
  Oligomer
uaccuaaaucauucgucuuac

SEQ ID NO: 15192 - RNA, 21 nt, artificial
  Oligomer
uuaacaggccacagucaaacu

SEQ ID NO: 15193 - RNA, 21 nt, artificial
  Oligomer
aauucugcauuucaaaacacc

SEQ ID NO: 15194 - RNA, 21 nt, artificial
  Oligomer
uuugcugcuaacagcauagag

SEQ ID NO: 15195 - RNA, 21 nt, artificial
  Oligomer
auucuucuccauuuuccaacc

SEQ ID NO: 15196 - RNA, 21 nt, artificial
  Oligomer
uucacuuccuuggucacgugg

SEQ ID NO: 15197 - RNA, 21 nt, artificial
  Oligomer
uuuccaguucucugcugaugu

SEQ ID NO: 15198 - RNA, 21 nt, artificial
  Oligomer
uuacaaaacacacagagauug

SEQ ID NO: 15199 - RNA, 21 nt, artificial
  Oligomer
uuggacuaucccuuuccuccu

SEQ ID NO: 15200 - RNA, 21 nt, artificial
  Oligomer
auguauauaccaguuaacagg

SEQ ID NO: 15201 - RNA, 21 nt, artificial
  Oligomer
uugcugaagaaaaauuccacu

SEQ ID NO: 15202 - RNA, 21 nt, artificial
  Oligomer
uugauuucaggguaagacucc

SEQ ID NO: 15203 - RNA, 21 nt, artificial
  Oligomer
uucccagaagaggucaauugc

SEQ ID NO: 15204 - RNA, 21 nt, artificial
  Oligomer
uucugcggacacuguuauaca

SEQ ID NO: 15205 - RNA, 21 nt, artificial
  Oligomer
uacacuuucccuucucaaucu

SEQ ID NO: 15206 - RNA, 21 nt, artificial
  Oligomer
ucccuucucaaucucucauuc

SEQ ID NO: 15207 - RNA, 21 nt, artificial
  Oligomer
uauugaaauccaguuugcugc

SEQ ID NO: 15208 - RNA, 21 nt, artificial
  Oligomer
ucauacuucagaacaacacac

SEQ ID NO: 15209 - RNA, 21 nt, artificial
  Oligomer
uacuucagaacaacacacucg

SEQ ID NO: 15210 - RNA, 21 nt, artificial
  Oligomer
auuuucuucuccuuuugccag

SEQ ID NO: 15211 - RNA, 21 nt, artificial
  Oligomer
aaguaagaccagggcacuucc

SEQ ID NO: 15212 - RNA, 21 nt, artificial
  Oligomer
uacaaaacacacagagauugg

SEQ ID NO: 15213 - RNA, 21 nt, artificial
  Oligomer
uaucccuuuccuccuugacua

SEQ ID NO: 15214 - RNA, 21 nt, artificial
  Oligomer
uuccugggucuccaaagguug

SEQ ID NO: 15215 - RNA, 21 nt, artificial
  Oligomer
uugacguaccuaaaucauucg

SEQ ID NO: 15216 - RNA, 21 nt, artificial
  Oligomer
uccagaacucaagaauucugc

SEQ ID NO: 15217 - RNA, 21 nt, artificial
  Oligomer
uuucccuucucaaucucucau

SEQ ID NO: 15218 - RNA, 21 nt, artificial
  Oligomer
uccuccuucucucucugcauc

SEQ ID NO: 15219 - RNA, 21 nt, artificial
  Oligomer
uccuucucucucugcaucuug

SEQ ID NO: 15220 - RNA, 21 nt, artificial
  Oligomer
ucuucuuacagucuauaaagc

SEQ ID NO: 15221 - RNA, 21 nt, artificial
  Oligomer
uugaaagcgucuuuuucauac

SEQ ID NO: 15222 - RNA, 21 nt, artificial
  Oligomer
uuagugauaucaaagaugguc

SEQ ID NO: 15223 - RNA, 21 nt, artificial
  Oligomer
uucuuuggguaaucuucagag

SEQ ID NO: 15224 - RNA, 21 nt, artificial
  Oligomer
uuagggucaaaagugaaagcc

SEQ ID NO: 15225 - RNA, 21 nt, artificial
  Oligomer
uugcucacguagaagacccuc

SEQ ID NO: 15226 - RNA, 21 nt, artificial
  Oligomer
uugcuguucaacuccagauuu

SEQ ID NO: 15227 - RNA, 21 nt, artificial
  Oligomer
uaugucuuuccaguucucugc

SEQ ID NO: 15228 - RNA, 21 nt, artificial
  Oligomer
augucuuuccaguucucugcu

SEQ ID NO: 15229 - RNA, 21 nt, artificial
  Oligomer
uguuauacagggcguacacuu

SEQ ID NO: 15230 - RNA, 21 nt, artificial
  Oligomer
uucaggguaagacuccacuuc

SEQ ID NO: 15231 - RNA, 21 nt, artificial
  Oligomer
uaagguaauggcccaggaugg

SEQ ID NO: 15232 - RNA, 21 nt, artificial
  Oligomer
uugaugagacacaugaagcug

SEQ ID NO: 15233 - RNA, 21 nt, artificial
  Oligomer
ucauagucagcaccauuuucu

SEQ ID NO: 15234 - RNA, 21 nt, artificial
  Oligomer
uaagucuuuggacuaucccuu

SEQ ID NO: 15235 - RNA, 21 nt, artificial
  Oligomer
uuuuggauaguucuccuuucu

SEQ ID NO: 15236 - RNA, 21 nt, artificial
  Oligomer
ucuccuaaagauguucaugcc

SEQ ID NO: 15237 - RNA, 21 nt, artificial
  Oligomer
uuuacagaggguuugaguuca

SEQ ID NO: 15238 - RNA, 21 nt, artificial
  Oligomer
uguauauaccaguuaacaggc

SEQ ID NO: 15239 - RNA, 21 nt, artificial
  Oligomer
ugccuuugucauuaauaacac

SEQ ID NO: 15240 - RNA, 21 nt, artificial
  Oligomer
acugguauucucuaaaguccc

SEQ ID NO: 15241 - RNA, 21 nt, artificial
  Oligomer
uuucaggguaagacuccacuu

SEQ ID NO: 15242 - RNA, 21 nt, artificial
  Oligomer
ucaggguaagacuccacuucu

SEQ ID NO: 15243 - RNA, 21 nt, artificial
  Oligomer
ucuccuuuugccaguagaugc

SEQ ID NO: 15244 - RNA, 21 nt, artificial
  Oligomer
uugccaguagaugcgaguuug

SEQ ID NO: 15245 - RNA, 21 nt, artificial
  Oligomer
uucccuuaguauugcugacaa

SEQ ID NO: 15246 - RNA, 21 nt, artificial
  Oligomer
gaggaaauuaguuuuggauag

SEQ ID NO: 15247 - RNA, 21 nt, artificial
  Oligomer
uuaggaaaucuggguucuggc

SEQ ID NO: 15248 - RNA, 21 nt, artificial
  Oligomer
cuucugugcccaccauauucc

SEQ ID NO: 15249 - RNA, 21 nt, artificial
  Oligomer
uaggucaggcagcauaucaca

SEQ ID NO: 15250 - RNA, 21 nt, artificial
  Oligomer
uuaucaggaaaaugcucuugc

SEQ ID NO: 15251 - RNA, 21 nt, artificial
  Oligomer
ucugauucacucuuaaauguc

SEQ ID NO: 15252 - RNA, 21 nt, artificial
  Oligomer
auggcauuuaauucuucucca

SEQ ID NO: 15253 - RNA, 21 nt, artificial
  Oligomer
uuuucuuuggguaaucuucag

SEQ ID NO: 15254 - RNA, 21 nt, artificial
  Oligomer
auagucagcaccauuuucuuc

SEQ ID NO: 15255 - RNA, 21 nt, artificial
  Oligomer
uucuucccuuaguauugcuga

SEQ ID NO: 15256 - RNA, 21 nt, artificial
  Oligomer
uauguugguguuagaccucuc

SEQ ID NO: 15257 - RNA, 21 nt, artificial
  Oligomer
uuuacacaggagcaagguuug

SEQ ID NO: 15258 - RNA, 21 nt, artificial
  Oligomer
uuugcuguucaacuccagauu

SEQ ID NO: 15259 - RNA, 21 nt, artificial
  Oligomer
augauaaugugauuaucccag

SEQ ID NO: 15260 - RNA, 21 nt, artificial
  Oligomer
uugaagauagcuuacugcuua

SEQ ID NO: 15261 - RNA, 21 nt, artificial
  Oligomer
uucuccuuucugcuguaccuc

SEQ ID NO: 15262 - RNA, 21 nt, artificial
  Oligomer
uacuuccuaugcauuacauug

SEQ ID NO: 15263 - RNA, 21 nt, artificial
  Oligomer
uuguggauuuaguuucacagc

SEQ ID NO: 15264 - RNA, 21 nt, artificial
  Oligomer
uucuacuuccagcagcacuuu

SEQ ID NO: 15265 - RNA, 21 nt, artificial
  Oligomer
uucagaacaacacacucguau

SEQ ID NO: 15266 - RNA, 21 nt, artificial
  Oligomer
uuugaguucacucaguacuug

SEQ ID NO: 15267 - RNA, 21 nt, artificial
  Oligomer
uuaagucuuuggacuaucccu

SEQ ID NO: 15268 - RNA, 21 nt, artificial
  Oligomer
uuccuccuugacuacugcuuu

SEQ ID NO: 15269 - RNA, 21 nt, artificial
  Oligomer
uguccaucugaggaaguuccc

SEQ ID NO: 15270 - RNA, 21 nt, artificial
  Oligomer
ucuuucacuuccuuggucacg

SEQ ID NO: 15271 - RNA, 21 nt, artificial
  Oligomer
uaguauugcugacaaaguauc

SEQ ID NO: 15272 - RNA, 21 nt, artificial
  Oligomer
uacgggaaacacugcuaguac

SEQ ID NO: 15273 - RNA, 21 nt, artificial
  Oligomer
uuagagaaaggagucaugagu

SEQ ID NO: 15274 - RNA, 21 nt, artificial
  Oligomer
agauguucaugccauacuucc

SEQ ID NO: 15275 - RNA, 21 nt, artificial
  Oligomer
uguucaugccauacuuccuau

SEQ ID NO: 15276 - RNA, 21 nt, artificial
  Oligomer
ugacauuaggaaaucagauag

SEQ ID NO: 15277 - RNA, 21 nt, artificial
  Oligomer
auuaggaaaucagauagucuc

SEQ ID NO: 15278 - RNA, 21 nt, artificial
  Oligomer
uaacacugguauucucuaaag

SEQ ID NO: 15279 - RNA, 21 nt, artificial
  Oligomer
uucucuaaagucccuuccaga

SEQ ID NO: 15280 - RNA, 21 nt, artificial
  Oligomer
ucauuccuccuucucucucug

SEQ ID NO: 15281 - RNA, 21 nt, artificial
  Oligomer
uuugugccagcucuucaacag

SEQ ID NO: 15282 - RNA, 21 nt, artificial
  Oligomer
ugagguauggacacuuggaug

SEQ ID NO: 15283 - RNA, 21 nt, artificial
  Oligomer
auaguuuuacacaggagcaag

SEQ ID NO: 15284 - RNA, 21 nt, artificial
  Oligomer
ucacguagaagacccuccagu

SEQ ID NO: 15285 - RNA, 21 nt, artificial
  Oligomer
cuucuuuugcuguucaacucc

SEQ ID NO: 15286 - RNA, 21 nt, artificial
  Oligomer
ugauguuuacaaaacacacag

SEQ ID NO: 15287 - RNA, 21 nt, artificial
  Oligomer
aaagguuguggauuuaguuuc

SEQ ID NO: 15288 - RNA, 21 nt, artificial
  Oligomer
uaugcauuacauugggcuuuu

SEQ ID NO: 15289 - RNA, 21 nt, artificial
  Oligomer
acuucugugcccaccauauuc

SEQ ID NO: 15290 - RNA, 21 nt, artificial
  Oligomer
auuucaggguaagacuccacu

SEQ ID NO: 15291 - RNA, 21 nt, artificial
  Oligomer
uugguugucauauugaaaucc

SEQ ID NO: 15292 - RNA, 21 nt, artificial
  Oligomer
aacagcauagagcucaguuuc

SEQ ID NO: 15293 - RNA, 21 nt, artificial
  Oligomer
uucauacuucagaacaacaca

SEQ ID NO: 15294 - RNA, 21 nt, artificial
  Oligomer
auuuggacccaaguaagacca

SEQ ID NO: 15295 - RNA, 21 nt, artificial
  Oligomer
uagucaucacaacuguuacua

SEQ ID NO: 15296 - RNA, 21 nt, artificial
  Oligomer
aucacaacuguuacuaaaugg

SEQ ID NO: 15297 - RNA, 21 nt, artificial
  Oligomer
uuugugaagcagcauagugag

SEQ ID NO: 15298 - RNA, 21 nt, artificial
  Oligomer
aucccagcuuaaguugcgucc

SEQ ID NO: 15299 - RNA, 21 nt, artificial
  Oligomer
uuggcuaugucuuuccaguuc

SEQ ID NO: 15300 - RNA, 21 nt, artificial
  Oligomer
uucgucuuacaugucagagga

SEQ ID NO: 15301 - RNA, 21 nt, artificial
  Oligomer
ucuccuuucugcuguaccuca

SEQ ID NO: 15302 - RNA, 21 nt, artificial
  Oligomer
uaacaggccacagucaaacug

SEQ ID NO: 15303 - RNA, 21 nt, artificial
  Oligomer
uugaguucacucaguacuugu

SEQ ID NO: 15304 - RNA, 21 nt, artificial
  Oligomer
ucucaaucucucauuccuccu

SEQ ID NO: 15305 - RNA, 21 nt, artificial
  Oligomer
aucauagucagcaccauuuuc

SEQ ID NO: 15306 - RNA, 21 nt, artificial
  Oligomer
uucuucuccuuuugccaguag

SEQ ID NO: 15307 - RNA, 21 nt, artificial
  Oligomer
acugcuaguaccuuauguugg

SEQ ID NO: 15308 - RNA, 21 nt, artificial
  Oligomer
uagagaaaggagucaugagua

SEQ ID NO: 15309 - RNA, 21 nt, artificial
  Oligomer
uuagggaucuaaggaggcccu

SEQ ID NO: 15310 - RNA, 21 nt, artificial
  Oligomer
uuaucaguccaauaugaacca

SEQ ID NO: 15311 - RNA, 21 nt, artificial
  Oligomer
uuuccauuagucuccuaaaga

SEQ ID NO: 15312 - RNA, 21 nt, artificial
  Oligomer
auucugcauuucaaaacaccu

SEQ ID NO: 15313 - RNA, 21 nt, artificial
  Oligomer
auugaaauccaguuugcugcu

SEQ ID NO: 15314 - RNA, 21 nt, artificial
  Oligomer
uagagcucaguuucaggaucu

SEQ ID NO: 15315 - RNA, 21 nt, artificial
  Oligomer
cuuggauggugauguucccug

SEQ ID NO: 15316 - RNA, 21 nt, artificial
  Oligomer
uugcugacaaaguaucugcug

SEQ ID NO: 15317 - RNA, 21 nt, artificial
  Oligomer
aaauguugucuucuuuugcug

SEQ ID NO: 15318 - RNA, 21 nt, artificial
  Oligomer
ugugauuaucccagcuuaagu

SEQ ID NO: 15319 - RNA, 21 nt, artificial
  Oligomer
cuuaaguugcguccacuucug

SEQ ID NO: 15320 - RNA, 21 nt, artificial
  Oligomer
uuguggaaggcaguuuuagag

SEQ ID NO: 15321 - RNA, 21 nt, artificial
  Oligomer
uacugcuuaguacauacacug

SEQ ID NO: 15322 - RNA, 21 nt, artificial
  Oligomer
auacacuguaaacaacgaucu

SEQ ID NO: 15323 - RNA, 21 nt, artificial
  Oligomer
uuacaugucagaggaaauuag

SEQ ID NO: 15324 - RNA, 21 nt, artificial
  Oligomer
auucucuaaagucccuuccag

SEQ ID NO: 15325 - RNA, 21 nt, artificial
  Oligomer
guacacuuucccuucucaauc

SEQ ID NO: 15326 - RNA, 21 nt, artificial
  Oligomer
gauggcauuuaauucuucucc

SEQ ID NO: 15327 - RNA, 21 nt, artificial
  Oligomer
uaucaaagaugguccgguucu

SEQ ID NO: 15328 - RNA, 21 nt, artificial
  Oligomer
augacaauccaauugcucacg

SEQ ID NO: 15329 - RNA, 21 nt, artificial
  Oligomer
uugaguuaaguauuccuguca

SEQ ID NO: 15330 - RNA, 21 nt, artificial
  Oligomer
ugucaauacgggaaacacugc

SEQ ID NO: 15331 - RNA, 21 nt, artificial
  Oligomer
uaguuuuacacaggagcaagg

SEQ ID NO: 15332 - RNA, 21 nt, artificial
  Oligomer
uaucccagcuuaaguugcguc

SEQ ID NO: 15333 - RNA, 21 nt, artificial
  Oligomer
uauggaaaguuacuaccuuag

SEQ ID NO: 15334 - RNA, 21 nt, artificial
  Oligomer
uaugaaccaguuaagucuuug

SEQ ID NO: 15335 - RNA, 21 nt, artificial
  Oligomer
auuuaguuucacagcuugcug

SEQ ID NO: 15336 - RNA, 21 nt, artificial
  Oligomer
uuucaaaacaccuugaucaag

SEQ ID NO: 15337 - RNA, 21 nt, artificial
  Oligomer
ucugugcccaccauauuccuc

SEQ ID NO: 15338 - RNA, 21 nt, artificial
  Oligomer
agcagguuaucaggaaaaugc

SEQ ID NO: 15339 - RNA, 21 nt, artificial
  Oligomer
cuuaaauguccauacuugaug

SEQ ID NO: 15340 - RNA, 21 nt, artificial
  Oligomer
uugacugauaacgucacuuca

SEQ ID NO: 15341 - RNA, 21 nt, artificial
  Oligomer
uuuugcuguucaacuccagau

SEQ ID NO: 15342 - RNA, 21 nt, artificial
  Oligomer
uaaugugauuaucccagcuua

SEQ ID NO: 15343 - RNA, 21 nt, artificial
  Oligomer
ugauuaucccagcuuaaguug

SEQ ID NO: 15344 - RNA, 21 nt, artificial
  Oligomer
ucccuuuccuccuugacuacu

SEQ ID NO: 15345 - RNA, 21 nt, artificial
  Oligomer
uccuccuugacuacugcuuug

SEQ ID NO: 15346 - RNA, 21 nt, artificial
  Oligomer
ugaaaaaaauggaauacuggg

SEQ ID NO: 15347 - RNA, 21 nt, artificial
  Oligomer
uuacagaggguuugaguucac

SEQ ID NO: 15348 - RNA, 21 nt, artificial
  Oligomer
acaaauucuacuuccagcagc

SEQ ID NO: 15349 - RNA, 21 nt, artificial
  Oligomer
uuuaguuucacagcuugcuga

SEQ ID NO: 15350 - RNA, 21 nt, artificial
  Oligomer
uuaaauccuuugauuucaggg

SEQ ID NO: 15351 - RNA, 21 nt, artificial
  Oligomer
uuccucuagacacuuccugca

SEQ ID NO: 15352 - RNA, 21 nt, artificial
  Oligomer
uccaucugaggaaguucccag

SEQ ID NO: 15353 - RNA, 21 nt, artificial
  Oligomer
uuacugagauuaagguaaugg

SEQ ID NO: 15354 - RNA, 21 nt, artificial
  Oligomer
ucuucaacagaaacauuguga

SEQ ID NO: 15355 - RNA, 21 nt, artificial
  Oligomer
aucuucagagaggcgacauuu

SEQ ID NO: 15356 - RNA, 21 nt, artificial
  Oligomer
auugcugacaaaguaucugcu

SEQ ID NO: 15357 - RNA, 21 nt, artificial
  Oligomer
auugaguuaaguauuccuguc

SEQ ID NO: 15358 - RNA, 21 nt, artificial
  Oligomer
uaaaggcuuuaaaucccagcc

SEQ ID NO: 15359 - RNA, 21 nt, artificial
  Oligomer
uagaagacccuccagugaugu

SEQ ID NO: 15360 - RNA, 21 nt, artificial
  Oligomer
uaccaaggagaaaaagccauc

SEQ ID NO: 15361 - RNA, 21 nt, artificial
  Oligomer
acauuugaagauagcuuacug

SEQ ID NO: 15362 - RNA, 21 nt, artificial
  Oligomer
uccaauaugaaccaguuaagu

SEQ ID NO: 15363 - RNA, 21 nt, artificial
  Oligomer
ucuucuacucugacauuagga

SEQ ID NO: 15364 - RNA, 21 nt, artificial
  Oligomer
auagucucugaaguugaccug

SEQ ID NO: 15365 - RNA, 21 nt, artificial
  Oligomer
uggcgcuggccuuuauaauuc

SEQ ID NO: 15366 - RNA, 21 nt, artificial
  Oligomer
uauaauucgggucaccucccu

SEQ ID NO: 15367 - RNA, 21 nt, artificial
  Oligomer
auaauucgggucaccucccug

SEQ ID NO: 15368 - RNA, 21 nt, artificial
  Oligomer
guauucucuaaagucccuucc

SEQ ID NO: 15369 - RNA, 21 nt, artificial
  Oligomer
uuccagaacucaagaauucug

SEQ ID NO: 15370 - RNA, 21 nt, artificial
  Oligomer
ugaagugaagaagcaccuaag

SEQ ID NO: 15371 - RNA, 21 nt, artificial
  Oligomer
aagagcagauacguaaagggc

SEQ ID NO: 15372 - RNA, 21 nt, artificial
  Oligomer
ucaggaaaaugcucuugcuug

SEQ ID NO: 15373 - RNA, 21 nt, artificial
  Oligomer
acucuuaaauguccauacuug

SEQ ID NO: 15374 - RNA, 21 nt, artificial
  Oligomer
acuugaugagacacaugaagc

SEQ ID NO: 15375 - RNA, 21 nt, artificial
  Oligomer
aauucuucuccauuuuccaac

SEQ ID NO: 15376 - RNA, 21 nt, artificial
  Oligomer
uuuuccaaccaggagagguga

SEQ ID NO: 15377 - RNA, 21 nt, artificial
  Oligomer
ucaaagucagauauacuaggu

SEQ ID NO: 15378 - RNA, 21 nt, artificial
  Oligomer
ugauaacgucacuucagccag

SEQ ID NO: 15379 - RNA, 21 nt, artificial
  Oligomer
auacuucagaacaacacacuc

SEQ ID NO: 15380 - RNA, 21 nt, artificial
  Oligomer
aacaacacacucguaugugcc

SEQ ID NO: 15381 - RNA, 21 nt, artificial
  Oligomer
uucuccuuuugccaguagaug

SEQ ID NO: 15382 - RNA, 21 nt, artificial
  Oligomer
uuuggguaaucuucagagagg

SEQ ID NO: 15383 - RNA, 21 nt, artificial
  Oligomer
aaagaaauugagguauggaca

SEQ ID NO: 15384 - RNA, 21 nt, artificial
  Oligomer
ugcccuacacugagaauauag

SEQ ID NO: 15385 - RNA, 21 nt, artificial
  Oligomer
ucuuuugcuguucaacuccag

SEQ ID NO: 15386 - RNA, 21 nt, artificial
  Oligomer
ugauaaugugauuaucccagc

SEQ ID NO: 15387 - RNA, 21 nt, artificial
  Oligomer
uuacuuuacagaggguuugag

SEQ ID NO: 15388 - RNA, 21 nt, artificial
  Oligomer
uuccaguucucugcugauguc

SEQ ID NO: 15389 - RNA, 21 nt, artificial
  Oligomer
uaucaguccaauaugaaccag

SEQ ID NO: 15390 - RNA, 21 nt, artificial
  Oligomer
ugacguaccuaaaucauucgu

SEQ ID NO: 15391 - RNA, 21 nt, artificial
  Oligomer
uguaaacagcagcauaaaauc

SEQ ID NO: 15392 - RNA, 21 nt, artificial
  Oligomer
uugcaaauggaggugggaccu

SEQ ID NO: 15393 - RNA, 21 nt, artificial
  Oligomer
uacagggcguacacuuucccu

SEQ ID NO: 15394 - RNA, 21 nt, artificial
  Oligomer
cagguuaucaggaaaaugcuc

SEQ ID NO: 15395 - RNA, 21 nt, artificial
  Oligomer
agguuaucaggaaaaugcucu

SEQ ID NO: 15396 - RNA, 21 nt, artificial
  Oligomer
uugaaggucugauucacucuu

SEQ ID NO: 15397 - RNA, 21 nt, artificial
  Oligomer
uuucaggaucuugggaaacug

SEQ ID NO: 15398 - RNA, 21 nt, artificial
  Oligomer
ucagauauacuagguguaggg

SEQ ID NO: 15399 - RNA, 21 nt, artificial
  Oligomer
ucccgcuugaaagcgucuuuu

SEQ ID NO: 15400 - RNA, 21 nt, artificial
  Oligomer
aucacaauggagagguuauua

SEQ ID NO: 15401 - RNA, 21 nt, artificial
  Oligomer
ucacaauggagagguuauuag

SEQ ID NO: 15402 - RNA, 21 nt, artificial
  Oligomer
aguuugugccagcucuucaac

SEQ ID NO: 15403 - RNA, 21 nt, artificial
  Oligomer
acuucuuucacuuccuugguc

SEQ ID NO: 15404 - RNA, 21 nt, artificial
  Oligomer
aacaauuuggacccaaguaag

SEQ ID NO: 15405 - RNA, 21 nt, artificial
  Oligomer
cugucaauacgggaaacacug

SEQ ID NO: 15406 - RNA, 21 nt, artificial
  Oligomer
uggucuagugaauuguggaag

SEQ ID NO: 15407 - RNA, 21 nt, artificial
  Oligomer
uuuagagaaaggagucaugag

SEQ ID NO: 15408 - RNA, 21 nt, artificial
  Oligomer
uggcuaugucuuuccaguucu

SEQ ID NO: 15409 - RNA, 21 nt, artificial
  Oligomer
uuuccuccuugacuacugcuu

SEQ ID NO: 15410 - RNA, 21 nt, artificial
  Oligomer
uaaagauguucaugccauacu

SEQ ID NO: 15411 - RNA, 21 nt, artificial
  Oligomer
aaagauguucaugccauacuu

SEQ ID NO: 15412 - RNA, 21 nt, artificial
  Oligomer
auguucaugccauacuuccua

SEQ ID NO: 15413 - RNA, 21 nt, artificial
  Oligomer
uuccuaugcauuacauugggc

SEQ ID NO: 15414 - RNA, 21 nt, artificial
  Oligomer
aucuucuacucugacauuagg

SEQ ID NO: 15415 - RNA, 21 nt, artificial
  Oligomer
uaggaaaucagauagucucug

SEQ ID NO: 15416 - RNA, 21 nt, artificial
  Oligomer
uuaguuucacagcuugcugaa

SEQ ID NO: 15417 - RNA, 21 nt, artificial
  Oligomer
ucuugcuugguuguauuccag

SEQ ID NO: 15418 - RNA, 21 nt, artificial
  Oligomer
uugcuugguuguauuccaguu

SEQ ID NO: 15419 - RNA, 21 nt, artificial
  Oligomer
agcucaguuucaggaucuugg

SEQ ID NO: 15420 - RNA, 21 nt, artificial
  Oligomer
cucuucuuacagucuauaaag

SEQ ID NO: 15421 - RNA, 21 nt, artificial
  Oligomer
guuucuucccuuaguauugcu

SEQ ID NO: 15422 - RNA, 21 nt, artificial
  Oligomer
uguuagaccucucugcccuac

SEQ ID NO: 15423 - RNA, 21 nt, artificial
  Oligomer
ugagguagcuaaagccauggg

SEQ ID NO: 15424 - RNA, 21 nt, artificial
  Oligomer
uucaacuccagauuuucagau

SEQ ID NO: 15425 - RNA, 21 nt, artificial
  Oligomer
aaagacccagaaauaccaagg

SEQ ID NO: 15426 - RNA, 21 nt, artificial
  Oligomer
uacacuguaaacaacgaucuc

SEQ ID NO: 15427 - RNA, 21 nt, artificial
  Oligomer
aaacugauaaagggaaagagc

SEQ ID NO: 15428 - RNA, 21 nt, artificial
  Oligomer
uaggaaaucuggguucuggcg

SEQ ID NO: 15429 - RNA, 21 nt, artificial
  Oligomer
uauucucuaaagucccuucca

SEQ ID NO: 15430 - RNA, 21 nt, artificial
  Oligomer
cuaagagcagauacguaaagg

SEQ ID NO: 15431 - RNA, 21 nt, artificial
  Oligomer
ugggaccuucagaucuuuuca

SEQ ID NO: 15432 - RNA, 21 nt, artificial
  Oligomer
cuucucaaucucucauuccuc

SEQ ID NO: 15433 - RNA, 21 nt, artificial
  Oligomer
uccacuucugagauguucucu

SEQ ID NO: 15434 - RNA, 21 nt, artificial
  Oligomer
ugauucacucuuaaaugucca

SEQ ID NO: 15435 - RNA, 21 nt, artificial
  Oligomer
agauguucucuucuuacaguc

SEQ ID NO: 15436 - RNA, 21 nt, artificial
  Oligomer
ucagaacaacacacucguaug

SEQ ID NO: 15437 - RNA, 21 nt, artificial
  Oligomer
ucguaugugcccucgucagau

SEQ ID NO: 15438 - RNA, 21 nt, artificial
  Oligomer
ugaacagaagugagaaagacc

SEQ ID NO: 15439 - RNA, 21 nt, artificial
  Oligomer
uguucaacuccagauuuucag

SEQ ID NO: 15440 - RNA, 21 nt, artificial
  Oligomer
auuugaagauagcuuacugcu

SEQ ID NO: 15441 - RNA, 21 nt, artificial
  Oligomer
ugacuacugcuuugacguacc

SEQ ID NO: 15442 - RNA, 21 nt, artificial
  Oligomer
uacugcuuugacguaccuaaa

SEQ ID NO: 15443 - RNA, 21 nt, artificial
  Oligomer
cugcuuugacguaccuaaauc

SEQ ID NO: 15444 - RNA, 21 nt, artificial
  Oligomer
uggaauacuggguaaacacca

SEQ ID NO: 15445 - RNA, 21 nt, artificial
  Oligomer
uuacauugggcuuuuguaaac

SEQ ID NO: 15446 - RNA, 21 nt, artificial
  Oligomer
auacguaaagggcaagguggg

SEQ ID NO: 15447 - RNA, 21 nt, artificial
  Oligomer
ucacucuuaaauguccauacu

SEQ ID NO: 15448 - RNA, 21 nt, artificial
  Oligomer
ucauauugaaauccaguuugc

SEQ ID NO: 15449 - RNA, 21 nt, artificial
  Oligomer
ucaaagaugguccgguucuug

SEQ ID NO: 15450 - RNA, 21 nt, artificial
  Oligomer
guugccacuucuuucacuucc

SEQ ID NO: 15451 - RNA, 21 nt, artificial
  Oligomer
cagaagugagaaagaccagcc

SEQ ID NO: 15452 - RNA, 21 nt, artificial
  Oligomer
ucagaugcuuagggucaaaag

SEQ ID NO: 15453 - RNA, 21 nt, artificial
  Oligomer
ugaaagccaacaauuuggacc

SEQ ID NO: 15454 - RNA, 21 nt, artificial
  Oligomer
uugugaagcagcauagugagg

SEQ ID NO: 15455 - RNA, 21 nt, artificial
  Oligomer
ucuaaaggcuuuaaaucccag

SEQ ID NO: 15456 - RNA, 21 nt, artificial
  Oligomer
augugcauuugagaaauguug

SEQ ID NO: 15457 - RNA, 21 nt, artificial
  Oligomer
uguugucuucuuuugcuguuc

SEQ ID NO: 15458 - RNA, 21 nt, artificial
  Oligomer
uccaguucucugcugauguca

SEQ ID NO: 15459 - RNA, 21 nt, artificial
  Oligomer
uacuuuacagaggguuugagu

SEQ ID NO: 15460 - RNA, 21 nt, artificial
  Oligomer
cugcugaugucagaaagaccc

SEQ ID NO: 15461 - RNA, 21 nt, artificial
  Oligomer
acuaccuuagacauuugaaga

SEQ ID NO: 15462 - RNA, 21 nt, artificial
  Oligomer
aauggaauacuggguaaacac

SEQ ID NO: 15463 - RNA, 21 nt, artificial
  Oligomer
uugggcuuuuguaaacagcag

SEQ ID NO: 15464 - RNA, 21 nt, artificial
  Oligomer
agcagcauaaaaucuucuacu

SEQ ID NO: 15465 - RNA, 21 nt, artificial
  Oligomer
uauaccaguuaacaggccaca

SEQ ID NO: 15466 - RNA, 21 nt, artificial
  Oligomer
aaucuuguccaucugaggaag

SEQ ID NO: 15467 - RNA, 21 nt, artificial
  Oligomer
uccaguuugcugcuaacagca

SEQ ID NO: 15468 - RNA, 21 nt, artificial
  Oligomer
uugcugcuaacagcauagagc

SEQ ID NO: 15469 - RNA, 21 nt, artificial
  Oligomer
uccauuuuccaaccaggagag

SEQ ID NO: 15470 - RNA, 21 nt, artificial
  Oligomer
uacuagguguagggaagucag

SEQ ID NO: 15471 - RNA, 21 nt, artificial
  Oligomer
uuucuucuccuuuugccagua

SEQ ID NO: 15472 - RNA, 21 nt, artificial
  Oligomer
auggcuucagaugcuuagggu

SEQ ID NO: 15473 - RNA, 21 nt, artificial
  Oligomer
uguuacuuuacagaggguuug

SEQ ID NO: 15474 - RNA, 21 nt, artificial
  Oligomer
aauauaguuuuacacaggagc

SEQ ID NO: 15475 - RNA, 21 nt, artificial
  Oligomer
agaaauguugucuucuuuugc

SEQ ID NO: 15476 - RNA, 21 nt, artificial
  Oligomer
uggaaaguuacuaccuuagac

SEQ ID NO: 15477 - RNA, 21 nt, artificial
  Oligomer
uacaugucagaggaaauuagu

SEQ ID NO: 15478 - RNA, 21 nt, artificial
  Oligomer
auuuccauuagucuccuaaag

SEQ ID NO: 15479 - RNA, 21 nt, artificial
  Oligomer
aauucuacuuccagcagcacu

SEQ ID NO: 15480 - RNA, 21 nt, artificial
  Oligomer
uaaagggaaagagcaccagag

SEQ ID NO: 15481 - RNA, 21 nt, artificial
  Oligomer
ugcugaagaaaaauuccacuu

SEQ ID NO: 15482 - RNA, 21 nt, artificial
  Oligomer
gucaauugcaaauggaggugg

SEQ ID NO: 15483 - RNA, 21 nt, artificial
  Oligomer
acuuucccuucucaaucucuc

SEQ ID NO: 15484 - RNA, 21 nt, artificial
  Oligomer
auccaguuugcugcuaacagc

SEQ ID NO: 15485 - RNA, 21 nt, artificial
  Oligomer
auagagcucaguuucaggauc

SEQ ID NO: 15486 - RNA, 21 nt, artificial
  Oligomer
uauacuagguguagggaaguc

SEQ ID NO: 15487 - RNA, 21 nt, artificial
  Oligomer
aaagcgucuuuuucauacuuc

SEQ ID NO: 15488 - RNA, 21 nt, artificial
  Oligomer
ucacuuuuucuuuggguaauc

SEQ ID NO: 15489 - RNA, 21 nt, artificial
  Oligomer
augguccgguucuuguacucg

SEQ ID NO: 15490 - RNA, 21 nt, artificial
  Oligomer
cuucuuucacuuccuugguca

SEQ ID NO: 15491 - RNA, 21 nt, artificial
  Oligomer
uuggacccaaguaagaccagg

SEQ ID NO: 15492 - RNA, 21 nt, artificial
  Oligomer
ucaacuuuguuucuucccuua

SEQ ID NO: 15493 - RNA, 21 nt, artificial
  Oligomer
ugacaauccaauugcucacgu

SEQ ID NO: 15494 - RNA, 21 nt, artificial
  Oligomer
uccaauugcucacguagaaga

SEQ ID NO: 15495 - RNA, 21 nt, artificial
  Oligomer
cuuuaaaucccagccaugugg

SEQ ID NO: 15496 - RNA, 21 nt, artificial
  Oligomer
ugagaugugcauuugagaaau

SEQ ID NO: 15497 - RNA, 21 nt, artificial
  Oligomer
ugcauuugagaaauguugucu

SEQ ID NO: 15498 - RNA, 21 nt, artificial
  Oligomer
cuucuggucuagugaauugug

SEQ ID NO: 15499 - RNA, 21 nt, artificial
  Oligomer
uguggaaggcaguuuuagaga

SEQ ID NO: 15500 - RNA, 21 nt, artificial
  Oligomer
ugucuuuccaguucucugcug

SEQ ID NO: 15501 - RNA, 21 nt, artificial
  Oligomer
aaacacacagagauuggaggg

SEQ ID NO: 15502 - RNA, 21 nt, artificial
  Oligomer
aaucauucgucuuacauguca

SEQ ID NO: 15503 - RNA, 21 nt, artificial
  Oligomer
aucauucgucuuacaugucag

SEQ ID NO: 15504 - RNA, 21 nt, artificial
  Oligomer
auuagucuccuaaagauguuc

SEQ ID NO: 15505 - RNA, 21 nt, artificial
  Oligomer
uccuaaagauguucaugccau

SEQ ID NO: 15506 - RNA, 21 nt, artificial
  Oligomer
aagauguucaugccauacuuc

SEQ ID NO: 15507 - RNA, 21 nt, artificial
  Oligomer
uguggauuuaguuucacagcu

SEQ ID NO: 15508 - RNA, 21 nt, artificial
  Oligomer
uugaccuguuauuggacaaau

SEQ ID NO: 15509 - RNA, 21 nt, artificial
  Oligomer
uggacaaauucuacuuccagc

SEQ ID NO: 15510 - RNA, 21 nt, artificial
  Oligomer
uacuuccagcagcacuuugcc

SEQ ID NO: 15511 - RNA, 21 nt, artificial
  Oligomer
accaguuaacaggccacaguc

SEQ ID NO: 15512 - RNA, 21 nt, artificial
  Oligomer
agucccuuccagaacucaaga

SEQ ID NO: 15513 - RNA, 21 nt, artificial
  Oligomer
uugaucaaggucaccagagcu

SEQ ID NO: 15514 - RNA, 21 nt, artificial
  Oligomer
accuucagaucuuuucagccc

SEQ ID NO: 15515 - RNA, 21 nt, artificial
  Oligomer
auacagggcguacacuuuccc

SEQ ID NO: 15516 - RNA, 21 nt, artificial
  Oligomer
auuccuccuucucucucugca

SEQ ID NO: 15517 - RNA, 21 nt, artificial
  Oligomer
aguaggucaggcagcauauca

SEQ ID NO: 15518 - RNA, 21 nt, artificial
  Oligomer
uugaaauccaguuugcugcua

SEQ ID NO: 15519 - RNA, 21 nt, artificial
  Oligomer
uucaggaucuugggaaacugu

SEQ ID NO: 15520 - RNA, 21 nt, artificial
  Oligomer
aaagucagauauacuaggugu

SEQ ID NO: 15521 - RNA, 21 nt, artificial
  Oligomer
ucuuguacucgggccauauau

SEQ ID NO: 15522 - RNA, 21 nt, artificial
  Oligomer
gucagcaccauuuucuucucc

SEQ ID NO: 15523 - RNA, 21 nt, artificial
  Oligomer
uucagaugcuuagggucaaaa

SEQ ID NO: 15524 - RNA, 21 nt, artificial
  Oligomer
cuuagcugccaugagaugugc

SEQ ID NO: 15525 - RNA, 21 nt, artificial
  Oligomer
ugugcauuugagaaauguugu

SEQ ID NO: 15526 - RNA, 21 nt, artificial
  Oligomer
ugaacagcaguuggcuauguc

SEQ ID NO: 15527 - RNA, 21 nt, artificial
  Oligomer
ucuuuggacuaucccuuuccu

SEQ ID NO: 15528 - RNA, 21 nt, artificial
  Oligomer
auggaauacuggguaaacacc

SEQ ID NO: 15529 - RNA, 21 nt, artificial
  Oligomer
uccauuagucuccuaaagaug

SEQ ID NO: 15530 - RNA, 21 nt, artificial
  Oligomer
ugcauuacauugggcuuuugu

SEQ ID NO: 15531 - RNA, 21 nt, artificial
  Oligomer
uuggacaaauucuacuuccag

SEQ ID NO: 15532 - RNA, 21 nt, artificial
  Oligomer
auaccaguuaacaggccacag

SEQ ID NO: 15533 - RNA, 21 nt, artificial
  Oligomer
uucacagcuugcugaagaaaa

SEQ ID NO: 15534 - RNA, 21 nt, artificial
  Oligomer
auugcaaauggaggugggacc

SEQ ID NO: 15535 - RNA, 21 nt, artificial
  Oligomer
acacuuucccuucucaaucuc

SEQ ID NO: 15536 - RNA, 21 nt, artificial
  Oligomer
acugagauuaagguaauggcc

SEQ ID NO: 15537 - RNA, 21 nt, artificial
  Oligomer
guuguauuccaguugaagguc

SEQ ID NO: 15538 - RNA, 21 nt, artificial
  Oligomer
cuuacagucuauaaagcaaug

SEQ ID NO: 15539 - RNA, 21 nt, artificial
  Oligomer
acugauaacgucacuucagcc

SEQ ID NO: 15540 - RNA, 21 nt, artificial
  Oligomer
uguacucgggccauauauuca

SEQ ID NO: 15541 - RNA, 21 nt, artificial
  Oligomer
ucagcaccauuuucuucuccu

SEQ ID NO: 15542 - RNA, 21 nt, artificial
  Oligomer
ucaacagaaacauugugacca

SEQ ID NO: 15543 - RNA, 21 nt, artificial
  Oligomer
aagagcugaaagaaauugagg

SEQ ID NO: 15544 - RNA, 21 nt, artificial
  Oligomer
acacuuggauggugauguucc

SEQ ID NO: 15545 - RNA, 21 nt, artificial
  Oligomer
ucugcuguagaauacaggaau

SEQ ID NO: 15546 - RNA, 21 nt, artificial
  Oligomer
aaacacugcuaguaccuuaug

SEQ ID NO: 15547 - RNA, 21 nt, artificial
  Oligomer
uuagaccucucugcccuacac

SEQ ID NO: 15548 - RNA, 21 nt, artificial
  Oligomer
gagaauauaguuuuacacagg

SEQ ID NO: 15549 - RNA, 21 nt, artificial
  Oligomer
auuaucccagcuuaaguugcg

SEQ ID NO: 15550 - RNA, 21 nt, artificial
  Oligomer
auguuuacaaaacacacagag

SEQ ID NO: 15551 - RNA, 21 nt, artificial
  Oligomer
ucugcugaugucagaaagacc

SEQ ID NO: 15552 - RNA, 21 nt, artificial
  Oligomer
aaggagaaaaagccaucuuag

SEQ ID NO: 15553 - RNA, 21 nt, artificial
  Oligomer
caucuuagggaucuaaggagg

SEQ ID NO: 15554 - RNA, 21 nt, artificial
  Oligomer
acagagauuggaggguguucc

SEQ ID NO: 15555 - RNA, 21 nt, artificial
  Oligomer
uaguucuccuuucugcuguac

SEQ ID NO: 15556 - RNA, 21 nt, artificial
  Oligomer
agcauaaaaucuucuacucug

SEQ ID NO: 15557 - RNA, 21 nt, artificial
  Oligomer
auauuccucuagacacuuccu

SEQ ID NO: 15558 - RNA, 21 nt, artificial
  Oligomer
uccucuagacacuuccugcaa

SEQ ID NO: 15559 - RNA, 21 nt, artificial
  Oligomer
aaucucucauuccuccuucuc

SEQ ID NO: 15560 - RNA, 21 nt, artificial
  Oligomer
uucuucuccauuuuccaacca

SEQ ID NO: 15561 - RNA, 21 nt, artificial
  Oligomer
accugaacagaagugagaaag

SEQ ID NO: 15562 - RNA, 21 nt, artificial
  Oligomer
uagaccucucugcccuacacu

SEQ ID NO: 15563 - RNA, 21 nt, artificial
  Oligomer
ugaagcagcauagugagguag

SEQ ID NO: 15564 - RNA, 21 nt, artificial
  Oligomer
uagucucugaaguugaccugu

SEQ ID NO: 15565 - RNA, 21 nt, artificial
  Oligomer
auucuacuuccagcagcacuu

SEQ ID NO: 15566 - RNA, 21 nt, artificial
  Oligomer
auaaagggaaagagcaccaga

SEQ ID NO: 15567 - RNA, 21 nt, artificial
  Oligomer
uacagaggguuugaguucacu

SEQ ID NO: 15568 - RNA, 21 nt, artificial
  Oligomer
cuugcugaagaaaaauuccac

SEQ ID NO: 15569 - RNA, 21 nt, artificial
  Oligomer
aucucucauuccuccuucucu

SEQ ID NO: 15570 - RNA, 21 nt, artificial
  Oligomer
uccauuuacugagauuaaggu

SEQ ID NO: 15571 - RNA, 21 nt, artificial
  Oligomer
cugagauuaagguaauggccc

SEQ ID NO: 15572 - RNA, 21 nt, artificial
  Oligomer
ugguuguauuccaguugaagg

SEQ ID NO: 15573 - RNA, 21 nt, artificial
  Oligomer
agacacaugaagcugugguug

SEQ ID NO: 15574 - RNA, 21 nt, artificial
  Oligomer
auauugaaauccaguuugcug

SEQ ID NO: 15575 - RNA, 21 nt, artificial
  Oligomer
ucuugggaaacuguuguguug

SEQ ID NO: 15576 - RNA, 21 nt, artificial
  Oligomer
acuucagaacaacacacucgu

SEQ ID NO: 15577 - RNA, 21 nt, artificial
  Oligomer
auaucaaagaugguccgguuc

SEQ ID NO: 15578 - RNA, 21 nt, artificial
  Oligomer
agaugguccgguucuuguacu

SEQ ID NO: 15579 - RNA, 21 nt, artificial
  Oligomer
guuugugccagcucuucaaca

SEQ ID NO: 15580 - RNA, 21 nt, artificial
  Oligomer
ugugccagcucuucaacagaa

SEQ ID NO: 15581 - RNA, 21 nt, artificial
  Oligomer
uaaucuucagagaggcgacau

SEQ ID NO: 15582 - RNA, 21 nt, artificial
  Oligomer
uuacacaggagcaagguuugu

SEQ ID NO: 15583 - RNA, 21 nt, artificial
  Oligomer
aauguugucuucuuuugcugu

SEQ ID NO: 15584 - RNA, 21 nt, artificial
  Oligomer
gucuucuuuugcuguucaacu

SEQ ID NO: 15585 - RNA, 21 nt, artificial
  Oligomer
aguugcguccacuucuggucu

SEQ ID NO: 15586 - RNA, 21 nt, artificial
  Oligomer
aguaacaugaacagcaguugg

SEQ ID NO: 15587 - RNA, 21 nt, artificial
  Oligomer
uacuaccuuagacauuugaag

SEQ ID NO: 15588 - RNA, 21 nt, artificial
  Oligomer
cuuacugcuuaguacauacac

SEQ ID NO: 15589 - RNA, 21 nt, artificial
  Oligomer
ucaaacuagcauaaagccauu

SEQ ID NO: 15590 - RNA, 21 nt, artificial
  Oligomer
aguuaagucuuuggacuaucc

SEQ ID NO: 15591 - RNA, 21 nt, artificial
  Oligomer
gucagaggaaauuaguuuugg

SEQ ID NO: 15592 - RNA, 21 nt, artificial
  Oligomer
aguuuuggauaguucuccuuu

SEQ ID NO: 15593 - RNA, 21 nt, artificial
  Oligomer
cugauaaagggaaagagcacc

SEQ ID NO: 15594 - RNA, 21 nt, artificial
  Oligomer
ucaaggucaccagagcuacuu

SEQ ID NO: 15595 - RNA, 21 nt, artificial
  Oligomer
aacugaagugaagaagcaccu

SEQ ID NO: 15596 - RNA, 21 nt, artificial
  Oligomer
ucaauugcaaauggagguggg

SEQ ID NO: 15597 - RNA, 21 nt, artificial
  Oligomer
agauuaagguaauggcccagg

SEQ ID NO: 15598 - RNA, 21 nt, artificial
  Oligomer
uugguuguauuccaguugaag

SEQ ID NO: 15599 - RNA, 21 nt, artificial
  Oligomer
aguugaaggucugauucacuc

SEQ ID NO: 15600 - RNA, 21 nt, artificial
  Oligomer
ugaugagacacaugaagcugu

SEQ ID NO: 15601 - RNA, 21 nt, artificial
  Oligomer
ugaagcugugguugguuguca

SEQ ID NO: 15602 - RNA, 21 nt, artificial
  Oligomer
auguucucuucuuacagucua

SEQ ID NO: 15603 - RNA, 21 nt, artificial
  Oligomer
accauuuucuucuccuuuugc

SEQ ID NO: 15604 - RNA, 21 nt, artificial
  Oligomer
aaacauugugaccacaggaca

SEQ ID NO: 15605 - RNA, 21 nt, artificial
  Oligomer
uugccacuucuuucacuuccu

SEQ ID NO: 15606 - RNA, 21 nt, artificial
  Oligomer
acagaagugagaaagaccagc

SEQ ID NO: 15607 - RNA, 21 nt, artificial
  Oligomer
uaucugcuguagaauacagga

SEQ ID NO: 15608 - RNA, 21 nt, artificial
  Oligomer
guugguguuagaccucucugc

SEQ ID NO: 15609 - RNA, 21 nt, artificial
  Oligomer
ucaacuccagauuuucagaug

SEQ ID NO: 15610 - RNA, 21 nt, artificial
  Oligomer
uaaguugcguccacuucuggu

SEQ ID NO: 15611 - RNA, 21 nt, artificial
  Oligomer
agugagagagcagcaauagag

SEQ ID NO: 15612 - RNA, 21 nt, artificial
  Oligomer
uucuacucugacauuaggaaa

SEQ ID NO: 15613 - RNA, 21 nt, artificial
  Oligomer
acuuugccugacauauauaug

SEQ ID NO: 15614 - RNA, 23 nt, artificial
  Oligomer
ggauaaucacauuaucaucugaa

SEQ ID NO: 15615 - RNA, 23 nt, artificial
  Oligomer
ccaacuucuaauauuagaaggau

SEQ ID NO: 15616 - RNA, 23 nt, artificial
  Oligomer
ggucuucuacgugagcaauugga

SEQ ID NO: 15617 - RNA, 23 nt, artificial
  Oligomer
cuguguaaaacuauauucucagu

SEQ ID NO: 15618 - RNA, 23 nt, artificial
  Oligomer
cuuuauagacuguaagaagagaa

SEQ ID NO: 15619 - RNA, 23 nt, artificial
  Oligomer
caacaguuucccaagauccugaa

SEQ ID NO: 15620 - RNA, 23 nt, artificial
  Oligomer
acauuaucaucugaaaaucugga

SEQ ID NO: 15621 - RNA, 23 nt, artificial
  Oligomer
gaauuauaaaggccagcgccaga

SEQ ID NO: 15622 - RNA, 23 nt, artificial
  Oligomer
guuuugaaaugcagaauucuuga

SEQ ID NO: 15623 - RNA, 23 nt, artificial
  Oligomer
guguaaaacuauauucucagugu

SEQ ID NO: 15624 - RNA, 23 nt, artificial
  Oligomer
caaccacagcuucaugugucuca

SEQ ID NO: 15625 - RNA, 23 nt, artificial
  Oligomer
ggauaauuugcucaaccucugga

SEQ ID NO: 15626 - RNA, 23 nt, artificial
  Oligomer
gacuuugaaauuccaacuucuaa

SEQ ID NO: 15627 - RNA, 23 nt, artificial
  Oligomer
gaaaaagacgcuuucaagcggga

SEQ ID NO: 15628 - RNA, 23 nt, artificial
  Oligomer
acuuuugacccuaagcaucugaa

SEQ ID NO: 15629 - RNA, 23 nt, artificial
  Oligomer
caacgcuguccuguggucacaau

SEQ ID NO: 15630 - RNA, 23 nt, artificial
  Oligomer
ccuguguaaaacuauauucucag

SEQ ID NO: 15631 - RNA, 23 nt, artificial
  Oligomer
cgcuguccuguggucacaauguu

SEQ ID NO: 15632 - RNA, 23 nt, artificial
  Oligomer
caguguuauuaaugacaaaggca

SEQ ID NO: 15633 - RNA, 23 nt, artificial
  Oligomer
ccuuaaucucaguaaauggaauu

SEQ ID NO: 15634 - RNA, 23 nt, artificial
  Oligomer
ugucauugcuuuauagacuguaa

SEQ ID NO: 15635 - RNA, 23 nt, artificial
  Oligomer
gcucaaccucuggagguuuucca

SEQ ID NO: 15636 - RNA, 23 nt, artificial
  Oligomer
cccaaagaaaaagugauuuguca

SEQ ID NO: 15637 - RNA, 23 nt, artificial
  Oligomer
uccuguguaaaacuauauucuca

SEQ ID NO: 15638 - RNA, 23 nt, artificial
  Oligomer
gaaggauaauuugcucaaccucu

SEQ ID NO: 15639 - RNA, 23 nt, artificial
  Oligomer
aacuauauucucaguguagggca

SEQ ID NO: 15640 - RNA, 23 nt, artificial
  Oligomer
guaaaacuauauucucaguguag

SEQ ID NO: 15641 - RNA, 23 nt, artificial
  Oligomer
cuccaaucucuguguguuuugua

SEQ ID NO: 15642 - RNA, 23 nt, artificial
  Oligomer
guuguuuacaguguauguacuaa

SEQ ID NO: 15643 - RNA, 23 nt, artificial
  Oligomer
ugauuuccuaaugucagaguaga

SEQ ID NO: 15644 - RNA, 23 nt, artificial
  Oligomer
ccaccuccauuugcaauugaccu

SEQ ID NO: 15645 - RNA, 23 nt, artificial
  Oligomer
gacuguggccuguuaacugguau

SEQ ID NO: 15646 - RNA, 23 nt, artificial
  Oligomer
gaaagacauagccaacugcuguu

SEQ ID NO: 15647 - RNA, 23 nt, artificial
  Oligomer
gguaguaacuuuccauagggccu

SEQ ID NO: 15648 - RNA, 23 nt, artificial
  Oligomer
acaaaagcccaauguaaugcaua

SEQ ID NO: 15649 - RNA, 23 nt, artificial
  Oligomer
guagaagauuuuaugcugcuguu

SEQ ID NO: 15650 - RNA, 23 nt, artificial
  Oligomer
gaauaccaguguuauuaaugaca

SEQ ID NO: 15651 - RNA, 23 nt, artificial
  Oligomer
gaccuugaucaagguguuuugaa

SEQ ID NO: 15652 - RNA, 23 nt, artificial
  Oligomer
aauuuuugugauaugcugccuga

SEQ ID NO: 15653 - RNA, 23 nt, artificial
  Oligomer
agugaaucagaccuucaacugga

SEQ ID NO: 15654 - RNA, 23 nt, artificial
  Oligomer
ccaaagaaaaagugauuugucau

SEQ ID NO: 15655 - RNA, 23 nt, artificial
  Oligomer
ucauauuggacugauaaucucuu

SEQ ID NO: 15656 - RNA, 23 nt, artificial
  Oligomer
gaauuuguccaauaacaggucaa

SEQ ID NO: 15657 - RNA, 23 nt, artificial
  Oligomer
guuucccaagauccugaaacuga

SEQ ID NO: 15658 - RNA, 23 nt, artificial
  Oligomer
ucaucagcccugccuguuuugca

SEQ ID NO: 15659 - RNA, 23 nt, artificial
  Oligomer
gugaugacuauguuucuauucua

SEQ ID NO: 15660 - RNA, 23 nt, artificial
  Oligomer
caaaagcccaauguaaugcauag

SEQ ID NO: 15661 - RNA, 23 nt, artificial
  Oligomer
gcugaaaagaucugaagguccca

SEQ ID NO: 15662 - RNA, 23 nt, artificial
  Oligomer
cucaguaaauggaauuuuuguga

SEQ ID NO: 15663 - RNA, 23 nt, artificial
  Oligomer
cuauauucucaguguagggcaga

SEQ ID NO: 15664 - RNA, 23 nt, artificial
  Oligomer
cauagggccuccuuagaucccua

SEQ ID NO: 15665 - RNA, 23 nt, artificial
  Oligomer
aaguaugaaaaagacgcuuucaa

SEQ ID NO: 15666 - RNA, 23 nt, artificial
  Oligomer
cuguaaaguaacagaaguuagaa

SEQ ID NO: 15667 - RNA, 23 nt, artificial
  Oligomer
ugacuguggccuguuaacuggua

SEQ ID NO: 15668 - RNA, 23 nt, artificial
  Oligomer
ccugaaaucaaaggauuuaaaga

SEQ ID NO: 15669 - RNA, 23 nt, artificial
  Oligomer
ccauuugcaauugaccucuucug

SEQ ID NO: 15670 - RNA, 23 nt, artificial
  Oligomer
gaacaucaccauccaagugucca

SEQ ID NO: 15671 - RNA, 23 nt, artificial
  Oligomer
aacucuggugcucuuucccuuua

SEQ ID NO: 15672 - RNA, 23 nt, artificial
  Oligomer
ccuccauuugcaauugaccucuu

SEQ ID NO: 15673 - RNA, 23 nt, artificial
  Oligomer
gagcucuaugcuguuagcagcaa

SEQ ID NO: 15674 - RNA, 23 nt, artificial
  Oligomer
cgaguacaagaaccggaccaucu

SEQ ID NO: 15675 - RNA, 23 nt, artificial
  Oligomer
caacauaagguacuagcaguguu

SEQ ID NO: 15676 - RNA, 23 nt, artificial
  Oligomer
ggaaagacauagccaacugcugu

SEQ ID NO: 15677 - RNA, 23 nt, artificial
  Oligomer
aauuauaaaggccagcgccagaa

SEQ ID NO: 15678 - RNA, 23 nt, artificial
  Oligomer
ggcugaaaagaucugaagguccc

SEQ ID NO: 15679 - RNA, 23 nt, artificial
  Oligomer
accuuaaucucaguaaauggaau

SEQ ID NO: 15680 - RNA, 23 nt, artificial
  Oligomer
caagauccugaaacugagcucua

SEQ ID NO: 15681 - RNA, 23 nt, artificial
  Oligomer
gauaucacuaauaaccucuccau

SEQ ID NO: 15682 - RNA, 23 nt, artificial
  Oligomer
caauucacuagaccagaagugga

SEQ ID NO: 15683 - RNA, 23 nt, artificial
  Oligomer
guuacucaugacuccuuucucua

SEQ ID NO: 15684 - RNA, 23 nt, artificial
  Oligomer
aguagaagauuuuaugcugcugu

SEQ ID NO: 15685 - RNA, 23 nt, artificial
  Oligomer
aacaguuucccaagauccugaaa

SEQ ID NO: 15686 - RNA, 23 nt, artificial
  Oligomer
agaguagaagauuuuaugcugcu

SEQ ID NO: 15687 - RNA, 23 nt, artificial
  Oligomer
augucaggcaaagugcugcugga

SEQ ID NO: 15688 - RNA, 23 nt, artificial
  Oligomer
ucuggugcucuuucccuuuauca

SEQ ID NO: 15689 - RNA, 23 nt, artificial
  Oligomer
ccgaauuauaaaggccagcgcca

SEQ ID NO: 15690 - RNA, 23 nt, artificial
  Oligomer
cucuuaggugcuucuucacuuca

SEQ ID NO: 15691 - RNA, 23 nt, artificial
  Oligomer
ggcacauacgaguguguuguucu

SEQ ID NO: 15692 - RNA, 23 nt, artificial
  Oligomer
gaugacuauguuucuauucuaag

SEQ ID NO: 15693 - RNA, 23 nt, artificial
  Oligomer
ccuccaaucucuguguguuuugu

SEQ ID NO: 15694 - RNA, 23 nt, artificial
  Oligomer
ucucuuuaaauggcuuuaugcua

SEQ ID NO: 15695 - RNA, 23 nt, artificial
  Oligomer
gaaauauuauugguguuuaccca

SEQ ID NO: 15696 - RNA, 23 nt, artificial
  Oligomer
guguuauuaaugacaaaggcacu

SEQ ID NO: 15697 - RNA, 23 nt, artificial
  Oligomer
acuaauaaccucuccauugugau

SEQ ID NO: 15698 - RNA, 23 nt, artificial
  Oligomer
cauauuggacugauaaucucuuu

SEQ ID NO: 15699 - RNA, 23 nt, artificial
  Oligomer
uguuuacccaguauuccauuuuu

SEQ ID NO: 15700 - RNA, 23 nt, artificial
  Oligomer
acuuuagagaauaccaguguuau

SEQ ID NO: 15701 - RNA, 23 nt, artificial
  Oligomer
ugaaggucccaccuccauuugca

SEQ ID NO: 15702 - RNA, 23 nt, artificial
  Oligomer
gaaacugagcucuaugcuguuag

SEQ ID NO: 15703 - RNA, 23 nt, artificial
  Oligomer
ccugaaacugagcucuaugcugu

SEQ ID NO: 15704 - RNA, 23 nt, artificial
  Oligomer
acaacaguuucccaagauccuga

SEQ ID NO: 15705 - RNA, 23 nt, artificial
  Oligomer
gaaaaagugauuugucauugcuu

SEQ ID NO: 15706 - RNA, 23 nt, artificial
  Oligomer
agauuacccaaagaaaaagugau

SEQ ID NO: 15707 - RNA, 23 nt, artificial
  Oligomer
uguuauccacgugaccaaggaag

SEQ ID NO: 15708 - RNA, 23 nt, artificial
  Oligomer
acaucaccauccaaguguccaua

SEQ ID NO: 15709 - RNA, 23 nt, artificial
  Oligomer
cuguauucuacagcagauacuuu

SEQ ID NO: 15710 - RNA, 23 nt, artificial
  Oligomer
cuaagccacauggcugggauuua

SEQ ID NO: 15711 - RNA, 23 nt, artificial
  Oligomer
uguuuugaaaugcagaauucuug

SEQ ID NO: 15712 - RNA, 23 nt, artificial
  Oligomer
ucuggugaccuugaucaaggugu

SEQ ID NO: 15713 - RNA, 23 nt, artificial
  Oligomer
agaucugaaggucccaccuccau

SEQ ID NO: 15714 - RNA, 23 nt, artificial
  Oligomer
cauuuuccugauaaccugcuccc

SEQ ID NO: 15715 - RNA, 23 nt, artificial
  Oligomer
gaacaccuggcugaagugacguu

SEQ ID NO: 15716 - RNA, 23 nt, artificial
  Oligomer
aaaaagacgcuuucaagcgggaa

SEQ ID NO: 15717 - RNA, 23 nt, artificial
  Oligomer
gaagagcuggcacaaacucgcau

SEQ ID NO: 15718 - RNA, 23 nt, artificial
  Oligomer
ccaaauuguuggcuuucacuuuu

SEQ ID NO: 15719 - RNA, 23 nt, artificial
  Oligomer
uguuucccguauugacaggaaua

SEQ ID NO: 15720 - RNA, 23 nt, artificial
  Oligomer
agguacuagcaguguuucccgua

SEQ ID NO: 15721 - RNA, 23 nt, artificial
  Oligomer
cacaaccuuuggagacccaggaa

SEQ ID NO: 15722 - RNA, 23 nt, artificial
  Oligomer
gauaguccaaagacuuaacuggu

SEQ ID NO: 15723 - RNA, 23 nt, artificial
  Oligomer
gauuuccuaacucuggugcucuu

SEQ ID NO: 15724 - RNA, 23 nt, artificial
  Oligomer
ggugacccgaauuauaaaggcca

SEQ ID NO: 15725 - RNA, 23 nt, artificial
  Oligomer
agggcacauacgaguguguuguu

SEQ ID NO: 15726 - RNA, 23 nt, artificial
  Oligomer
aucugacgagggcacauacgagu

SEQ ID NO: 15727 - RNA, 23 nt, artificial
  Oligomer
guugugaugacuauguuucuauu

SEQ ID NO: 15728 - RNA, 23 nt, artificial
  Oligomer
guucauguuacucaugacuccuu

SEQ ID NO: 15729 - RNA, 23 nt, artificial
  Oligomer
agacauagccaacugcuguucau

SEQ ID NO: 15730 - RNA, 23 nt, artificial
  Oligomer
guauuucugggucuuucugacau

SEQ ID NO: 15731 - RNA, 23 nt, artificial
  Oligomer
uaacuuuccauagggccuccuua

SEQ ID NO: 15732 - RNA, 23 nt, artificial
  Oligomer
cugauaaucucuuuaaauggcuu

SEQ ID NO: 15733 - RNA, 23 nt, artificial
  Oligomer
gacugauaaucucuuuaaauggc

SEQ ID NO: 15734 - RNA, 23 nt, artificial
  Oligomer
ugacuuugaaauuccaacuucua

SEQ ID NO: 15735 - RNA, 23 nt, artificial
  Oligomer
cuuuagagccagcccauggcuuu

SEQ ID NO: 15736 - RNA, 23 nt, artificial
  Oligomer
aaaugcacaucucauggcagcua

SEQ ID NO: 15737 - RNA, 23 nt, artificial
  Oligomer
gccuuccacaauucacuagacca

SEQ ID NO: 15738 - RNA, 23 nt, artificial
  Oligomer
ccuuucucuaaaacugccuucca

SEQ ID NO: 15739 - RNA, 23 nt, artificial
  Oligomer
aagauggcuuuuucuccuuggua

SEQ ID NO: 15740 - RNA, 23 nt, artificial
  Oligomer
uguaaugcauaggaaguauggca

SEQ ID NO: 15741 - RNA, 23 nt, artificial
  Oligomer
acccugaaaucaaaggauuuaaa

SEQ ID NO: 15742 - RNA, 23 nt, artificial
  Oligomer
guugcuuugcaggaagugucuag

SEQ ID NO: 15743 - RNA, 23 nt, artificial
  Oligomer
cguaucugcucuuaggugcuucu

SEQ ID NO: 15744 - RNA, 23 nt, artificial
  Oligomer
uaccuuaaucucaguaaauggaa

SEQ ID NO: 15745 - RNA, 23 nt, artificial
  Oligomer
uugucauugcuuuauagacugua

SEQ ID NO: 15746 - RNA, 23 nt, artificial
  Oligomer
aaaagacgcuuucaagcgggaac

SEQ ID NO: 15747 - RNA, 23 nt, artificial
  Oligomer
gauuacccaaagaaaaagugauu

SEQ ID NO: 15748 - RNA, 23 nt, artificial
  Oligomer
cacaaacucgcaucuacuggcaa

SEQ ID NO: 15749 - RNA, 23 nt, artificial
  Oligomer
guccaaauuguuggcuuucacuu

SEQ ID NO: 15750 - RNA, 23 nt, artificial
  Oligomer
gucuucuacgugagcaauuggau

SEQ ID NO: 15751 - RNA, 23 nt, artificial
  Oligomer
cccuaagauggcuuuuucuccuu

SEQ ID NO: 15752 - RNA, 23 nt, artificial
  Oligomer
ccuuagaucccuaagauggcuuu

SEQ ID NO: 15753 - RNA, 23 nt, artificial
  Oligomer
ucaacuucagagacuaucugauu

SEQ ID NO: 15754 - RNA, 23 nt, artificial
  Oligomer
ccuacaccuaguauaucugacuu

SEQ ID NO: 15755 - RNA, 23 nt, artificial
  Oligomer
aguacaagaaccggaccaucuuu

SEQ ID NO: 15756 - RNA, 23 nt, artificial
  Oligomer
ucuguaaaguaacagaaguuaga

SEQ ID NO: 15757 - RNA, 23 nt, artificial
  Oligomer
ugugaugacuauguuucuauucu

SEQ ID NO: 15758 - RNA, 23 nt, artificial
  Oligomer
agcuaagccacauggcugggauu

SEQ ID NO: 15759 - RNA, 23 nt, artificial
  Oligomer
cauuaucaucugaaaaucuggag

SEQ ID NO: 15760 - RNA, 23 nt, artificial
  Oligomer
ccuuccacaauucacuagaccag

SEQ ID NO: 15761 - RNA, 23 nt, artificial
  Oligomer
acuccuuucucuaaaacugccuu

SEQ ID NO: 15762 - RNA, 23 nt, artificial
  Oligomer
cuggaaagacauagccaacugcu

SEQ ID NO: 15763 - RNA, 23 nt, artificial
  Oligomer
agaauuuguccaauaacagguca

SEQ ID NO: 15764 - RNA, 23 nt, artificial
  Oligomer
aguagaauuuguccaauaacagg

SEQ ID NO: 15765 - RNA, 23 nt, artificial
  Oligomer
aauucuugaguucuggaagggac

SEQ ID NO: 15766 - RNA, 23 nt, artificial
  Oligomer
uucacuucaguugcuuugcagga

SEQ ID NO: 15767 - RNA, 23 nt, artificial
  Oligomer
agaagggaaaguguacgcccugu

SEQ ID NO: 15768 - RNA, 23 nt, artificial
  Oligomer
gauuucaauaugacaaccaacca

SEQ ID NO: 15769 - RNA, 23 nt, artificial
  Oligomer
ucuuggugcuggcuggucuuucu

SEQ ID NO: 15770 - RNA, 23 nt, artificial
  Oligomer
acuaaauccacaaccuuuggaga

SEQ ID NO: 15771 - RNA, 23 nt, artificial
  Oligomer
cccugaaaucaaaggauuuaaag

SEQ ID NO: 15772 - RNA, 23 nt, artificial
  Oligomer
cugaaaagaucugaaggucccac

SEQ ID NO: 15773 - RNA, 23 nt, artificial
  Oligomer
cugaaacugagcucuaugcuguu

SEQ ID NO: 15774 - RNA, 23 nt, artificial
  Oligomer
guacaagaaccggaccaucuuug

SEQ ID NO: 15775 - RNA, 23 nt, artificial
  Oligomer
acgcuguccuguggucacaaugu

SEQ ID NO: 15776 - RNA, 23 nt, artificial
  Oligomer
gugcuggcuggucuuucucacuu

SEQ ID NO: 15777 - RNA, 23 nt, artificial
  Oligomer
caucucauggcagcuaagccaca

SEQ ID NO: 15778 - RNA, 23 nt, artificial
  Oligomer
ccaguauuccauuuuuuucauug

SEQ ID NO: 15779 - RNA, 23 nt, artificial
  Oligomer
ggaauuuuucuucagcaagcugu

SEQ ID NO: 15780 - RNA, 23 nt, artificial
  Oligomer
uacccugaaaucaaaggauuuaa

SEQ ID NO: 15781 - RNA, 23 nt, artificial
  Oligomer
guuauuaaugacaaaggcacuga

SEQ ID NO: 15782 - RNA, 23 nt, artificial
  Oligomer
uuuugaaaugcagaauucuugag

SEQ ID NO: 15783 - RNA, 23 nt, artificial
  Oligomer
acagaaguagcucuggugaccuu

SEQ ID NO: 15784 - RNA, 23 nt, artificial
  Oligomer
guaucugcucuuaggugcuucuu

SEQ ID NO: 15785 - RNA, 23 nt, artificial
  Oligomer
uuaccuuaaucucaguaaaugga

SEQ ID NO: 15786 - RNA, 23 nt, artificial
  Oligomer
caauaugacaaccaaccacagcu

SEQ ID NO: 15787 - RNA, 23 nt, artificial
  Oligomer
ugaaacugagcucuaugcuguua

SEQ ID NO: 15788 - RNA, 23 nt, artificial
  Oligomer
cuguucagguguuauccacguga

SEQ ID NO: 15789 - RNA, 23 nt, artificial
  Oligomer
uucuguucagguguuauccacgu

SEQ ID NO: 15790 - RNA, 23 nt, artificial
  Oligomer
gcugcuucacaaaccuugcuccu

SEQ ID NO: 15791 - RNA, 23 nt, artificial
  Oligomer
cuaagauggcuuuuucuccuugg

SEQ ID NO: 15792 - RNA, 23 nt, artificial
  Oligomer
uacuaagcaguaagcuaucuuca

SEQ ID NO: 15793 - RNA, 23 nt, artificial
  Oligomer
cgaauuauaaaggccagcgccag

SEQ ID NO: 15794 - RNA, 23 nt, artificial
  Oligomer
ucuugaguucuggaagggacuuu

SEQ ID NO: 15795 - RNA, 23 nt, artificial
  Oligomer
uugaaaugcagaauucuugaguu

SEQ ID NO: 15796 - RNA, 23 nt, artificial
  Oligomer
aguugcuuugcaggaagugucua

SEQ ID NO: 15797 - RNA, 23 nt, artificial
  Oligomer
gacccuaagcaucugaagccaug

SEQ ID NO: 15798 - RNA, 23 nt, artificial
  Oligomer
ucaguguagggcagagaggucua

SEQ ID NO: 15799 - RNA, 23 nt, artificial
  Oligomer
acucuggugcucuuucccuuuau

SEQ ID NO: 15800 - RNA, 23 nt, artificial
  Oligomer
ucacuucaguugcuuugcaggaa

SEQ ID NO: 15801 - RNA, 23 nt, artificial
  Oligomer
uucugggaacuuccucagaugga

SEQ ID NO: 15802 - RNA, 23 nt, artificial
  Oligomer
gaccucuucugggaacuuccuca

SEQ ID NO: 15803 - RNA, 23 nt, artificial
  Oligomer
uuggugcuggcuggucuuucuca

SEQ ID NO: 15804 - RNA, 23 nt, artificial
  Oligomer
caauuggauugucaucagcccug

SEQ ID NO: 15805 - RNA, 23 nt, artificial
  Oligomer
aaaacuauauucucaguguaggg

SEQ ID NO: 15806 - RNA, 23 nt, artificial
  Oligomer
uguauguacuaagcaguaagcua

SEQ ID NO: 15807 - RNA, 23 nt, artificial
  Oligomer
uaaaaugagaucguuguuuacag

SEQ ID NO: 15808 - RNA, 23 nt, artificial
  Oligomer
ucuuuaaauggcuuuaugcuagu

SEQ ID NO: 15809 - RNA, 23 nt, artificial
  Oligomer
auguaagacgaaugauuuaggua

SEQ ID NO: 15810 - RNA, 23 nt, artificial
  Oligomer
gcuucuucacuucaguugcuuug

SEQ ID NO: 15811 - RNA, 23 nt, artificial
  Oligomer
gaucugaaggucccaccuccauu

SEQ ID NO: 15812 - RNA, 23 nt, artificial
  Oligomer
caaccaaccacagcuucaugugu

SEQ ID NO: 15813 - RNA, 23 nt, artificial
  Oligomer
uccaacuucuaauauuagaagga

SEQ ID NO: 15814 - RNA, 23 nt, artificial
  Oligomer
uucccuacaccuaguauaucuga

SEQ ID NO: 15815 - RNA, 23 nt, artificial
  Oligomer
gaaguaugaaaaagacgcuuuca

SEQ ID NO: 15816 - RNA, 23 nt, artificial
  Oligomer
cugaaguaugaaaaagacgcuuu

SEQ ID NO: 15817 - RNA, 23 nt, artificial
  Oligomer
gcacauacgaguguguuguucug

SEQ ID NO: 15818 - RNA, 23 nt, artificial
  Oligomer
uccuguggucacaauguuucugu

SEQ ID NO: 15819 - RNA, 23 nt, artificial
  Oligomer
gcuguccuguggucacaauguuu

SEQ ID NO: 15820 - RNA, 23 nt, artificial
  Oligomer
aacaucaccauccaaguguccau

SEQ ID NO: 15821 - RNA, 23 nt, artificial
  Oligomer
gauugucaucagcccugccuguu

SEQ ID NO: 15822 - RNA, 23 nt, artificial
  Oligomer
uuuagagccagcccauggcuuua

SEQ ID NO: 15823 - RNA, 23 nt, artificial
  Oligomer
gucuuucugacaucagcagagaa

SEQ ID NO: 15824 - RNA, 23 nt, artificial
  Oligomer
aauccacaaccuuuggagaccca

SEQ ID NO: 15825 - RNA, 23 nt, artificial
  Oligomer
ggcuuuaugcuaguuugaccuca

SEQ ID NO: 15826 - RNA, 23 nt, artificial
  Oligomer
cuaacucuggugcucuuucccuu

SEQ ID NO: 15827 - RNA, 23 nt, artificial
  Oligomer
uuacccugaaaucaaaggauuua

SEQ ID NO: 15828 - RNA, 23 nt, artificial
  Oligomer
uuugaaaugcagaauucuugagu

SEQ ID NO: 15829 - RNA, 23 nt, artificial
  Oligomer
gcccuuuacguaucugcucuuag

SEQ ID NO: 15830 - RNA, 23 nt, artificial
  Oligomer
ggauuucaauaugacaaccaacc

SEQ ID NO: 15831 - RNA, 23 nt, artificial
  Oligomer
cccuacaccuaguauaucugacu

SEQ ID NO: 15832 - RNA, 23 nt, artificial
  Oligomer
gaguacaagaaccggaccaucuu

SEQ ID NO: 15833 - RNA, 23 nt, artificial
  Oligomer
caaaaggagaagaaaauggugcu

SEQ ID NO: 15834 - RNA, 23 nt, artificial
  Oligomer
uguccuguggucacaauguuucu

SEQ ID NO: 15835 - RNA, 23 nt, artificial
  Oligomer
uauccacgugaccaaggaaguga

SEQ ID NO: 15836 - RNA, 23 nt, artificial
  Oligomer
gucuuucucacuucuguucaggu

SEQ ID NO: 15837 - RNA, 23 nt, artificial
  Oligomer
cucaauuucuuucagcucuuggu

SEQ ID NO: 15838 - RNA, 23 nt, artificial
  Oligomer
uaagcaucugaagccaugggcca

SEQ ID NO: 15839 - RNA, 23 nt, artificial
  Oligomer
uguaaaguaacagaaguuagaag

SEQ ID NO: 15840 - RNA, 23 nt, artificial
  Oligomer
gucuaacaccaacauaagguacu

SEQ ID NO: 15841 - RNA, 23 nt, artificial
  Oligomer
guaacuuuccauagggccuccuu

SEQ ID NO: 15842 - RNA, 23 nt, artificial
  Oligomer
uguaagacgaaugauuuagguac

SEQ ID NO: 15843 - RNA, 23 nt, artificial
  Oligomer
ucagaaguggagucuuacccuga

SEQ ID NO: 15844 - RNA, 23 nt, artificial
  Oligomer
ccucuucugggaacuuccucaga

SEQ ID NO: 15845 - RNA, 23 nt, artificial
  Oligomer
caguuucccaagauccugaaacu

SEQ ID NO: 15846 - RNA, 23 nt, artificial
  Oligomer
aaaggagaagaaaauggugcuga

SEQ ID NO: 15847 - RNA, 23 nt, artificial
  Oligomer
gucuuacuuggguccaaauuguu

SEQ ID NO: 15848 - RNA, 23 nt, artificial
  Oligomer
uugucaucagcccugccuguuuu

SEQ ID NO: 15849 - RNA, 23 nt, artificial
  Oligomer
auucuacagcagauacuuuguca

SEQ ID NO: 15850 - RNA, 23 nt, artificial
  Oligomer
guguuucccguauugacaggaau

SEQ ID NO: 15851 - RNA, 23 nt, artificial
  Oligomer
uucagaugauaaugugauuaucc

SEQ ID NO: 15852 - RNA, 23 nt, artificial
  Oligomer
auccuucuaauauuagaaguugg

SEQ ID NO: 15853 - RNA, 23 nt, artificial
  Oligomer
uccaauugcucacguagaagacc

SEQ ID NO: 15854 - RNA, 23 nt, artificial
  Oligomer
acugagaauauaguuuuacacag

SEQ ID NO: 15855 - RNA, 23 nt, artificial
  Oligomer
uucucuucuuacagucuauaaag

SEQ ID NO: 15856 - RNA, 23 nt, artificial
  Oligomer
uucaggaucuugggaaacuguug

SEQ ID NO: 15857 - RNA, 23 nt, artificial
  Oligomer
uccagauuuucagaugauaaugu

SEQ ID NO: 15858 - RNA, 23 nt, artificial
  Oligomer
ucuggcgcuggccuuuauaauuc

SEQ ID NO: 15859 - RNA, 23 nt, artificial
  Oligomer
ucaagaauucugcauuucaaaac

SEQ ID NO: 15860 - RNA, 23 nt, artificial
  Oligomer
acacugagaauauaguuuuacac

SEQ ID NO: 15861 - RNA, 23 nt, artificial
  Oligomer
ugagacacaugaagcugugguug

SEQ ID NO: 15862 - RNA, 23 nt, artificial
  Oligomer
uccagagguugagcaaauuaucc

SEQ ID NO: 15863 - RNA, 23 nt, artificial
  Oligomer
uuagaaguuggaauuucaaaguc

SEQ ID NO: 15864 - RNA, 23 nt, artificial
  Oligomer
ucccgcuugaaagcgucuuuuuc

SEQ ID NO: 15865 - RNA, 23 nt, artificial
  Oligomer
uucagaugcuuagggucaaaagu

SEQ ID NO: 15866 - RNA, 23 nt, artificial
  Oligomer
auugugaccacaggacagcguug

SEQ ID NO: 15867 - RNA, 23 nt, artificial
  Oligomer
cugagaauauaguuuuacacagg

SEQ ID NO: 15868 - RNA, 23 nt, artificial
  Oligomer
aacauugugaccacaggacagcg

SEQ ID NO: 15869 - RNA, 23 nt, artificial
  Oligomer
ugccuuugucauuaauaacacug

SEQ ID NO: 15870 - RNA, 23 nt, artificial
  Oligomer
aauuccauuuacugagauuaagg

SEQ ID NO: 15871 - RNA, 23 nt, artificial
  Oligomer
uuacagucuauaaagcaaugaca

SEQ ID NO: 15872 - RNA, 23 nt, artificial
  Oligomer
uggaaaaccuccagagguugagc

SEQ ID NO: 15873 - RNA, 23 nt, artificial
  Oligomer
ugacaaaucacuuuuucuuuggg

SEQ ID NO: 15874 - RNA, 23 nt, artificial
  Oligomer
ugagaauauaguuuuacacagga

SEQ ID NO: 15875 - RNA, 23 nt, artificial
  Oligomer
agagguugagcaaauuauccuuc

SEQ ID NO: 15876 - RNA, 23 nt, artificial
  Oligomer
ugcccuacacugagaauauaguu

SEQ ID NO: 15877 - RNA, 23 nt, artificial
  Oligomer
cuacacugagaauauaguuuuac

SEQ ID NO: 15878 - RNA, 23 nt, artificial
  Oligomer
uacaaaacacacagagauuggag

SEQ ID NO: 15879 - RNA, 23 nt, artificial
  Oligomer
uuaguacauacacuguaaacaac

SEQ ID NO: 15880 - RNA, 23 nt, artificial
  Oligomer
ucuacucugacauuaggaaauca

SEQ ID NO: 15881 - RNA, 23 nt, artificial
  Oligomer
aggucaauugcaaauggaggugg

SEQ ID NO: 15882 - RNA, 23 nt, artificial
  Oligomer
auaccaguuaacaggccacaguc

SEQ ID NO: 15883 - RNA, 23 nt, artificial
  Oligomer
aacagcaguuggcuaugucuuuc

SEQ ID NO: 15884 - RNA, 23 nt, artificial
  Oligomer
aggcccuauggaaaguuacuacc

SEQ ID NO: 15885 - RNA, 23 nt, artificial
  Oligomer
uaugcauuacauugggcuuuugu

SEQ ID NO: 15886 - RNA, 23 nt, artificial
  Oligomer
aacagcagcauaaaaucuucuac

SEQ ID NO: 15887 - RNA, 23 nt, artificial
  Oligomer
ugucauuaauaacacugguauuc

SEQ ID NO: 15888 - RNA, 23 nt, artificial
  Oligomer
uucaaaacaccuugaucaagguc

SEQ ID NO: 15889 - RNA, 23 nt, artificial
  Oligomer
ucaggcagcauaucacaaaaauu

SEQ ID NO: 15890 - RNA, 23 nt, artificial
  Oligomer
uccaguugaaggucugauucacu

SEQ ID NO: 15891 - RNA, 23 nt, artificial
  Oligomer
augacaaaucacuuuuucuuugg

SEQ ID NO: 15892 - RNA, 23 nt, artificial
  Oligomer
aagagauuaucaguccaauauga

SEQ ID NO: 15893 - RNA, 23 nt, artificial
  Oligomer
uugaccuguuauuggacaaauuc

SEQ ID NO: 15894 - RNA, 23 nt, artificial
  Oligomer
ucaguuucaggaucuugggaaac

SEQ ID NO: 15895 - RNA, 23 nt, artificial
  Oligomer
ugcaaaacaggcagggcugauga

SEQ ID NO: 15896 - RNA, 23 nt, artificial
  Oligomer
uagaauagaaacauagucaucac

SEQ ID NO: 15897 - RNA, 23 nt, artificial
  Oligomer
cuaugcauuacauugggcuuuug

SEQ ID NO: 15898 - RNA, 23 nt, artificial
  Oligomer
ugggaccuucagaucuuuucagc

SEQ ID NO: 15899 - RNA, 23 nt, artificial
  Oligomer
ucacaaaaauuccauuuacugag

SEQ ID NO: 15900 - RNA, 23 nt, artificial
  Oligomer
ucugcccuacacugagaauauag

SEQ ID NO: 15901 - RNA, 23 nt, artificial
  Oligomer
uagggaucuaaggaggcccuaug

SEQ ID NO: 15902 - RNA, 23 nt, artificial
  Oligomer
uugaaagcgucuuuuucauacuu

SEQ ID NO: 15903 - RNA, 23 nt, artificial
  Oligomer
uucuaacuucuguuacuuuacag

SEQ ID NO: 15904 - RNA, 23 nt, artificial
  Oligomer
uaccaguuaacaggccacaguca

SEQ ID NO: 15905 - RNA, 23 nt, artificial
  Oligomer
ucuuuaaauccuuugauuucagg

SEQ ID NO: 15906 - RNA, 23 nt, artificial
  Oligomer
cagaagaggucaauugcaaaugg

SEQ ID NO: 15907 - RNA, 23 nt, artificial
  Oligomer
uggacacuuggauggugauguuc

SEQ ID NO: 15908 - RNA, 23 nt, artificial
  Oligomer
uaaagggaaagagcaccagaguu

SEQ ID NO: 15909 - RNA, 23 nt, artificial
  Oligomer
aagaggucaauugcaaauggagg

SEQ ID NO: 15910 - RNA, 23 nt, artificial
  Oligomer
uugcugcuaacagcauagagcuc

SEQ ID NO: 15911 - RNA, 23 nt, artificial
  Oligomer
agaugguccgguucuuguacucg

SEQ ID NO: 15912 - RNA, 23 nt, artificial
  Oligomer
aacacugcuaguaccuuauguug

SEQ ID NO: 15913 - RNA, 23 nt, artificial
  Oligomer
acagcaguuggcuaugucuuucc

SEQ ID NO: 15914 - RNA, 23 nt, artificial
  Oligomer
uucuggcgcuggccuuuauaauu

SEQ ID NO: 15915 - RNA, 23 nt, artificial
  Oligomer
gggaccuucagaucuuuucagcc

SEQ ID NO: 15916 - RNA, 23 nt, artificial
  Oligomer
auuccauuuacugagauuaaggu

SEQ ID NO: 15917 - RNA, 23 nt, artificial
  Oligomer
uagagcucaguuucaggaucuug

SEQ ID NO: 15918 - RNA, 23 nt, artificial
  Oligomer
auggagagguuauuagugauauc

SEQ ID NO: 15919 - RNA, 23 nt, artificial
  Oligomer
uccacuucuggucuagugaauug

SEQ ID NO: 15920 - RNA, 23 nt, artificial
  Oligomer
uagagaaaggagucaugaguaac

SEQ ID NO: 15921 - RNA, 23 nt, artificial
  Oligomer
acagcagcauaaaaucuucuacu

SEQ ID NO: 15922 - RNA, 23 nt, artificial
  Oligomer
uuucaggaucuugggaaacuguu

SEQ ID NO: 15923 - RNA, 23 nt, artificial
  Oligomer
agcagcauaaaaucuucuacucu

SEQ ID NO: 15924 - RNA, 23 nt, artificial
  Oligomer
uccagcagcacuuugccugacau

SEQ ID NO: 15925 - RNA, 23 nt, artificial
  Oligomer
ugauaaagggaaagagcaccaga

SEQ ID NO: 15926 - RNA, 23 nt, artificial
  Oligomer
uggcgcuggccuuuauaauucgg

SEQ ID NO: 15927 - RNA, 23 nt, artificial
  Oligomer
ugaagugaagaagcaccuaagag

SEQ ID NO: 15928 - RNA, 23 nt, artificial
  Oligomer
agaacaacacacucguaugugcc

SEQ ID NO: 15929 - RNA, 23 nt, artificial
  Oligomer
cuuagaauagaaacauagucauc

SEQ ID NO: 15930 - RNA, 23 nt, artificial
  Oligomer
acaaaacacacagagauuggagg

SEQ ID NO: 15931 - RNA, 23 nt, artificial
  Oligomer
uagcauaaagccauuuaaagaga

SEQ ID NO: 15932 - RNA, 23 nt, artificial
  Oligomer
uggguaaacaccaauaauauuuc

SEQ ID NO: 15933 - RNA, 23 nt, artificial
  Oligomer
agugccuuugucauuaauaacac

SEQ ID NO: 15934 - RNA, 23 nt, artificial
  Oligomer
aucacaauggagagguuauuagu

SEQ ID NO: 15935 - RNA, 23 nt, artificial
  Oligomer
aaagagauuaucaguccaauaug

SEQ ID NO: 15936 - RNA, 23 nt, artificial
  Oligomer
aaaaauggaauacuggguaaaca

SEQ ID NO: 15937 - RNA, 23 nt, artificial
  Oligomer
auaacacugguauucucuaaagu

SEQ ID NO: 15938 - RNA, 23 nt, artificial
  Oligomer
ugcaaauggaggugggaccuuca

SEQ ID NO: 15939 - RNA, 23 nt, artificial
  Oligomer
cuaacagcauagagcucaguuuc

SEQ ID NO: 15940 - RNA, 23 nt, artificial
  Oligomer
acagcauagagcucaguuucagg

SEQ ID NO: 15941 - RNA, 23 nt, artificial
  Oligomer
ucaggaucuugggaaacuguugu

SEQ ID NO: 15942 - RNA, 23 nt, artificial
  Oligomer
aagcaaugacaaaucacuuuuuc

SEQ ID NO: 15943 - RNA, 23 nt, artificial
  Oligomer
aucacuuuuucuuuggguaaucu

SEQ ID NO: 15944 - RNA, 23 nt, artificial
  Oligomer
cuuccuuggucacguggauaaca

SEQ ID NO: 15945 - RNA, 23 nt, artificial
  Oligomer
uauggacacuuggauggugaugu

SEQ ID NO: 15946 - RNA, 23 nt, artificial
  Oligomer
aaaguaucugcuguagaauacag

SEQ ID NO: 15947 - RNA, 23 nt, artificial
  Oligomer
uaaaucccagccauguggcuuag

SEQ ID NO: 15948 - RNA, 23 nt, artificial
  Oligomer
caagaauucugcauuucaaaaca

SEQ ID NO: 15949 - RNA, 23 nt, artificial
  Oligomer
acaccuugaucaaggucaccaga

SEQ ID NO: 15950 - RNA, 23 nt, artificial
  Oligomer
auggaggugggaccuucagaucu

SEQ ID NO: 15951 - RNA, 23 nt, artificial
  Oligomer
gggagcagguuaucaggaaaaug

SEQ ID NO: 15952 - RNA, 23 nt, artificial
  Oligomer
aacgucacuucagccagguguuc

SEQ ID NO: 15953 - RNA, 23 nt, artificial
  Oligomer
uucccgcuugaaagcgucuuuuu

SEQ ID NO: 15954 - RNA, 23 nt, artificial
  Oligomer
augcgaguuugugccagcucuuc

SEQ ID NO: 15955 - RNA, 23 nt, artificial
  Oligomer
aaaagugaaagccaacaauuugg

SEQ ID NO: 15956 - RNA, 23 nt, artificial
  Oligomer
uauuccugucaauacgggaaaca

SEQ ID NO: 15957 - RNA, 23 nt, artificial
  Oligomer
uacgggaaacacugcuaguaccu

SEQ ID NO: 15958 - RNA, 23 nt, artificial
  Oligomer
uuccugggucuccaaagguugug

SEQ ID NO: 15959 - RNA, 23 nt, artificial
  Oligomer
accaguuaagucuuuggacuauc

SEQ ID NO: 15960 - RNA, 23 nt, artificial
  Oligomer
aagagcaccagaguuaggaaauc

SEQ ID NO: 15961 - RNA, 23 nt, artificial
  Oligomer
uggccuuuauaauucgggucacc

SEQ ID NO: 15962 - RNA, 23 nt, artificial
  Oligomer
aacaacacacucguaugugcccu

SEQ ID NO: 15963 - RNA, 23 nt, artificial
  Oligomer
acucguaugugcccucgucagau

SEQ ID NO: 15964 - RNA, 23 nt, artificial
  Oligomer
aauagaaacauagucaucacaac

SEQ ID NO: 15965 - RNA, 23 nt, artificial
  Oligomer
aaggagucaugaguaacaugaac

SEQ ID NO: 15966 - RNA, 23 nt, artificial
  Oligomer
augaacagcaguuggcuaugucu

SEQ ID NO: 15967 - RNA, 23 nt, artificial
  Oligomer
augucagaaagacccagaaauac

SEQ ID NO: 15968 - RNA, 23 nt, artificial
  Oligomer
uaaggaggcccuauggaaaguua

SEQ ID NO: 15969 - RNA, 23 nt, artificial
  Oligomer
aagccauuuaaagagauuaucag

SEQ ID NO: 15970 - RNA, 23 nt, artificial
  Oligomer
gccauuuaaagagauuaucaguc

SEQ ID NO: 15971 - RNA, 23 nt, artificial
  Oligomer
uagaaguuggaauuucaaaguca

SEQ ID NO: 15972 - RNA, 23 nt, artificial
  Oligomer
aaagccaugggcuggcucuaaag

SEQ ID NO: 15973 - RNA, 23 nt, artificial
  Oligomer
uagcugccaugagaugugcauuu

SEQ ID NO: 15974 - RNA, 23 nt, artificial
  Oligomer
uggucuagugaauuguggaaggc

SEQ ID NO: 15975 - RNA, 23 nt, artificial
  Oligomer
uggaaggcaguuuuagagaaagg

SEQ ID NO: 15976 - RNA, 23 nt, artificial
  Oligomer
uaccaaggagaaaaagccaucuu

SEQ ID NO: 15977 - RNA, 23 nt, artificial
  Oligomer
ugccauacuuccuaugcauuaca

SEQ ID NO: 15978 - RNA, 23 nt, artificial
  Oligomer
uuuaaauccuuugauuucagggu

SEQ ID NO: 15979 - RNA, 23 nt, artificial
  Oligomer
cuagacacuuccugcaaagcaac

SEQ ID NO: 15980 - RNA, 23 nt, artificial
  Oligomer
agaagcaccuaagagcagauacg

SEQ ID NO: 15981 - RNA, 23 nt, artificial
  Oligomer
uuccauuuacugagauuaaggua

SEQ ID NO: 15982 - RNA, 23 nt, artificial
  Oligomer
uacagucuauaaagcaaugacaa

SEQ ID NO: 15983 - RNA, 23 nt, artificial
  Oligomer
guucccgcuugaaagcgucuuuu

SEQ ID NO: 15984 - RNA, 23 nt, artificial
  Oligomer
aaucacuuuuucuuuggguaauc

SEQ ID NO: 15985 - RNA, 23 nt, artificial
  Oligomer
uugccaguagaugcgaguuugug

SEQ ID NO: 15986 - RNA, 23 nt, artificial
  Oligomer
aagugaaagccaacaauuuggac

SEQ ID NO: 15987 - RNA, 23 nt, artificial
  Oligomer
auccaauugcucacguagaagac

SEQ ID NO: 15988 - RNA, 23 nt, artificial
  Oligomer
aaggagaaaaagccaucuuaggg

SEQ ID NO: 15989 - RNA, 23 nt, artificial
  Oligomer
aaagccaucuuagggaucuaagg

SEQ ID NO: 15990 - RNA, 23 nt, artificial
  Oligomer
aaucagauagucucugaaguuga

SEQ ID NO: 15991 - RNA, 23 nt, artificial
  Oligomer
aagucagauauacuagguguagg

SEQ ID NO: 15992 - RNA, 23 nt, artificial
  Oligomer
aaagaugguccgguucuuguacu

SEQ ID NO: 15993 - RNA, 23 nt, artificial
  Oligomer
ucuaacuucuguuacuuuacaga

SEQ ID NO: 15994 - RNA, 23 nt, artificial
  Oligomer
agaauagaaacauagucaucaca

SEQ ID NO: 15995 - RNA, 23 nt, artificial
  Oligomer
aaucccagccauguggcuuagcu

SEQ ID NO: 15996 - RNA, 23 nt, artificial
  Oligomer
cuccagauuuucagaugauaaug

SEQ ID NO: 15997 - RNA, 23 nt, artificial
  Oligomer
cuggucuagugaauuguggaagg

SEQ ID NO: 15998 - RNA, 23 nt, artificial
  Oligomer
aaggcaguuuuagagaaaggagu

SEQ ID NO: 15999 - RNA, 23 nt, artificial
  Oligomer
agcaguuggcuaugucuuuccag

SEQ ID NO: 16000 - RNA, 23 nt, artificial
  Oligomer
ugaccuguuauuggacaaauucu

SEQ ID NO: 16001 - RNA, 23 nt, artificial
  Oligomer
ccuguuauuggacaaauucuacu

SEQ ID NO: 16002 - RNA, 23 nt, artificial
  Oligomer
gucccuuccagaacucaagaauu

SEQ ID NO: 16003 - RNA, 23 nt, artificial
  Oligomer
uccugcaaagcaacugaagugaa

SEQ ID NO: 16004 - RNA, 23 nt, artificial
  Oligomer
acagggcguacacuuucccuucu

SEQ ID NO: 16005 - RNA, 23 nt, artificial
  Oligomer
ugguugguugucauauugaaauc

SEQ ID NO: 16006 - RNA, 23 nt, artificial
  Oligomer
agaaagaccagccagcaccaaga

SEQ ID NO: 16007 - RNA, 23 nt, artificial
  Oligomer
ucuccaaagguuguggauuuagu

SEQ ID NO: 16008 - RNA, 23 nt, artificial
  Oligomer
cuuuaaauccuuugauuucaggg

SEQ ID NO: 16009 - RNA, 23 nt, artificial
  Oligomer
gugggaccuucagaucuuuucag

SEQ ID NO: 16010 - RNA, 23 nt, artificial
  Oligomer
aacagcauagagcucaguuucag

SEQ ID NO: 16011 - RNA, 23 nt, artificial
  Oligomer
caaagaugguccgguucuuguac

SEQ ID NO: 16012 - RNA, 23 nt, artificial
  Oligomer
acauugugaccacaggacagcgu

SEQ ID NO: 16013 - RNA, 23 nt, artificial
  Oligomer
aagugagaaagaccagccagcac

SEQ ID NO: 16014 - RNA, 23 nt, artificial
  Oligomer
uguggcuuagcugccaugagaug

SEQ ID NO: 16015 - RNA, 23 nt, artificial
  Oligomer
caaugaaaaaaauggaauacugg

SEQ ID NO: 16016 - RNA, 23 nt, artificial
  Oligomer
acagcuugcugaagaaaaauucc

SEQ ID NO: 16017 - RNA, 23 nt, artificial
  Oligomer
uuaaauccuuugauuucagggua

SEQ ID NO: 16018 - RNA, 23 nt, artificial
  Oligomer
ucagugccuuugucauuaauaac

SEQ ID NO: 16019 - RNA, 23 nt, artificial
  Oligomer
cucaagaauucugcauuucaaaa

SEQ ID NO: 16020 - RNA, 23 nt, artificial
  Oligomer
aaggucaccagagcuacuucugu

SEQ ID NO: 16021 - RNA, 23 nt, artificial
  Oligomer
aagaagcaccuaagagcagauac

SEQ ID NO: 16022 - RNA, 23 nt, artificial
  Oligomer
uccauuuacugagauuaagguaa

SEQ ID NO: 16023 - RNA, 23 nt, artificial
  Oligomer
agcugugguugguugucauauug

SEQ ID NO: 16024 - RNA, 23 nt, artificial
  Oligomer
uaacagcauagagcucaguuuca

SEQ ID NO: 16025 - RNA, 23 nt, artificial
  Oligomer
ucacguggauaacaccugaacag

SEQ ID NO: 16026 - RNA, 23 nt, artificial
  Oligomer
acguggauaacaccugaacagaa

SEQ ID NO: 16027 - RNA, 23 nt, artificial
  Oligomer
aggagcaagguuugugaagcagc

SEQ ID NO: 16028 - RNA, 23 nt, artificial
  Oligomer
ccaaggagaaaaagccaucuuag

SEQ ID NO: 16029 - RNA, 23 nt, artificial
  Oligomer
ugaagauagcuuacugcuuagua

SEQ ID NO: 16030 - RNA, 23 nt, artificial
  Oligomer
cuggcgcuggccuuuauaauucg

SEQ ID NO: 16031 - RNA, 23 nt, artificial
  Oligomer
aaagucccuuccagaacucaaga

SEQ ID NO: 16032 - RNA, 23 nt, artificial
  Oligomer
aacucaagaauucugcauuucaa

SEQ ID NO: 16033 - RNA, 23 nt, artificial
  Oligomer
uagacacuuccugcaaagcaacu

SEQ ID NO: 16034 - RNA, 23 nt, artificial
  Oligomer
cauggcuucagaugcuuaggguc

SEQ ID NO: 16035 - RNA, 23 nt, artificial
  Oligomer
uagaccucucugcccuacacuga

SEQ ID NO: 16036 - RNA, 23 nt, artificial
  Oligomer
auaaagggaaagagcaccagagu

SEQ ID NO: 16037 - RNA, 23 nt, artificial
  Oligomer
uuccugcaaagcaacugaaguga

SEQ ID NO: 16038 - RNA, 23 nt, artificial
  Oligomer
uccaucugaggaaguucccagaa

SEQ ID NO: 16039 - RNA, 23 nt, artificial
  Oligomer
ugaggaaguucccagaagagguc

SEQ ID NO: 16040 - RNA, 23 nt, artificial
  Oligomer
ugagaaagaccagccagcaccaa

SEQ ID NO: 16041 - RNA, 23 nt, artificial
  Oligomer
cagggcugaugacaauccaauug

SEQ ID NO: 16042 - RNA, 23 nt, artificial
  Oligomer
cccuacacugagaauauaguuuu

SEQ ID NO: 16043 - RNA, 23 nt, artificial
  Oligomer
uagcuuacugcuuaguacauaca

SEQ ID NO: 16044 - RNA, 23 nt, artificial
  Oligomer
cuguaaacaacgaucucauuuua

SEQ ID NO: 16045 - RNA, 23 nt, artificial
  Oligomer
acuagcauaaagccauuuaaaga

SEQ ID NO: 16046 - RNA, 23 nt, artificial
  Oligomer
uaccuaaaucauucgucuuacau

SEQ ID NO: 16047 - RNA, 23 nt, artificial
  Oligomer
caaagcaacugaagugaagaagc

SEQ ID NO: 16048 - RNA, 23 nt, artificial
  Oligomer
aauggaggugggaccuucagauc

SEQ ID NO: 16049 - RNA, 23 nt, artificial
  Oligomer
acacaugaagcugugguugguug

SEQ ID NO: 16050 - RNA, 23 nt, artificial
  Oligomer
uccuucuaauauuagaaguugga

SEQ ID NO: 16051 - RNA, 23 nt, artificial
  Oligomer
ucagauauacuagguguagggaa

SEQ ID NO: 16052 - RNA, 23 nt, artificial
  Oligomer
ugaaagcgucuuuuucauacuuc

SEQ ID NO: 16053 - RNA, 23 nt, artificial
  Oligomer
aaagcgucuuuuucauacuucag

SEQ ID NO: 16054 - RNA, 23 nt, artificial
  Oligomer
cagaacaacacacucguaugugc

SEQ ID NO: 16055 - RNA, 23 nt, artificial
  Oligomer
acagaaacauugugaccacagga

SEQ ID NO: 16056 - RNA, 23 nt, artificial
  Oligomer
aaacauugugaccacaggacagc

SEQ ID NO: 16057 - RNA, 23 nt, artificial
  Oligomer
auggacacuuggauggugauguu

SEQ ID NO: 16058 - RNA, 23 nt, artificial
  Oligomer
aacaggcagggcugaugacaauc

SEQ ID NO: 16059 - RNA, 23 nt, artificial
  Oligomer
uaaagccaugggcuggcucuaaa

SEQ ID NO: 16060 - RNA, 23 nt, artificial
  Oligomer
uucucugcugaugucagaaagac

SEQ ID NO: 16061 - RNA, 23 nt, artificial
  Oligomer
ugggucuccaaagguuguggauu

SEQ ID NO: 16062 - RNA, 23 nt, artificial
  Oligomer
ugaggucaaacuagcauaaagcc

SEQ ID NO: 16063 - RNA, 23 nt, artificial
  Oligomer
aagggaaagagcaccagaguuag

SEQ ID NO: 16064 - RNA, 23 nt, artificial
  Oligomer
uaaauccuuugauuucaggguaa

SEQ ID NO: 16065 - RNA, 23 nt, artificial
  Oligomer
acucaagaauucugcauuucaaa

SEQ ID NO: 16066 - RNA, 23 nt, artificial
  Oligomer
cuaagagcagauacguaaagggc

SEQ ID NO: 16067 - RNA, 23 nt, artificial
  Oligomer
gguugguugucauauugaaaucc

SEQ ID NO: 16068 - RNA, 23 nt, artificial
  Oligomer
agucagauauacuagguguaggg

SEQ ID NO: 16069 - RNA, 23 nt, artificial
  Oligomer
aagaugguccgguucuuguacuc

SEQ ID NO: 16070 - RNA, 23 nt, artificial
  Oligomer
agcaccauuuucuucuccuuuug

SEQ ID NO: 16071 - RNA, 23 nt, artificial
  Oligomer
agaaacauugugaccacaggaca

SEQ ID NO: 16072 - RNA, 23 nt, artificial
  Oligomer
ucacuuccuuggucacguggaua

SEQ ID NO: 16073 - RNA, 23 nt, artificial
  Oligomer
accugaacagaagugagaaagac

SEQ ID NO: 16074 - RNA, 23 nt, artificial
  Oligomer
accaagagcugaaagaaauugag

SEQ ID NO: 16075 - RNA, 23 nt, artificial
  Oligomer
uggcccauggcuucagaugcuua

SEQ ID NO: 16076 - RNA, 23 nt, artificial
  Oligomer
cuucuaacuucuguuacuuuaca

SEQ ID NO: 16077 - RNA, 23 nt, artificial
  Oligomer
aguaccuuauguugguguuagac

SEQ ID NO: 16078 - RNA, 23 nt, artificial
  Oligomer
aaggaggcccuauggaaaguuac

SEQ ID NO: 16079 - RNA, 23 nt, artificial
  Oligomer
guaccuaaaucauucgucuuaca

SEQ ID NO: 16080 - RNA, 23 nt, artificial
  Oligomer
ucaggguaagacuccacuucuga

SEQ ID NO: 16081 - RNA, 23 nt, artificial
  Oligomer
ucugaggaaguucccagaagagg

SEQ ID NO: 16082 - RNA, 23 nt, artificial
  Oligomer
aguuucaggaucuugggaaacug

SEQ ID NO: 16083 - RNA, 23 nt, artificial
  Oligomer
ucagcaccauuuucuucuccuuu

SEQ ID NO: 16084 - RNA, 23 nt, artificial
  Oligomer
aacaauuuggacccaaguaagac

SEQ ID NO: 16085 - RNA, 23 nt, artificial
  Oligomer
aaaacaggcagggcugaugacaa

SEQ ID NO: 16086 - RNA, 23 nt, artificial
  Oligomer
ugacaaaguaucugcuguagaau

SEQ ID NO: 16087 - RNA, 23 nt, artificial
  Oligomer
auuccugucaauacgggaaacac

SEQ ID NO: 16088 - RNA, 23 nt, artificial
  Oligomer
gguguuuugaaaugcagaauucu

SEQ ID NO: 16089 - RNA, 23 nt, artificial
  Oligomer
agguguuuugaaaugcagaauuc

SEQ ID NO: 16090 - RNA, 23 nt, artificial
  Oligomer
aagguguuuugaaaugcagaauu

SEQ ID NO: 16091 - RNA, 23 nt, artificial
  Oligomer
caagguguuuugaaaugcagaau

SEQ ID NO: 16092 - RNA, 23 nt, artificial
  Oligomer
ucaagguguuuugaaaugcagaa

SEQ ID NO: 16093 - RNA, 23 nt, artificial
  Oligomer
gagaacuauccaaaacuaauuuc

SEQ ID NO: 16094 - RNA, 23 nt, artificial
  Oligomer
ggagaacuauccaaaacuaauuu

SEQ ID NO: 16095 - RNA, 23 nt, artificial
  Oligomer
aggagaacuauccaaaacuaauu

SEQ ID NO: 16096 - RNA, 23 nt, artificial
  Oligomer
aaggagaacuauccaaaacuaau

SEQ ID NO: 16097 - RNA, 23 nt, artificial
  Oligomer
aaaggagaacuauccaaaacuaa

SEQ ID NO: 16098 - RNA, 23 nt, artificial
  Oligomer
ggaggugacccgaauuauaaagg

SEQ ID NO: 16099 - RNA, 23 nt, artificial
  Oligomer
gggaggugacccgaauuauaaag

SEQ ID NO: 16100 - RNA, 23 nt, artificial
  Oligomer
agggaggugacccgaauuauaaa

SEQ ID NO: 16101 - RNA, 23 nt, artificial
  Oligomer
cagggaggugacccgaauuauaa

SEQ ID NO: 16102 - RNA, 23 nt, artificial
  Oligomer
ccagggaggugacccgaauuaua

SEQ ID NO: 16103 - RNA, 23 nt, artificial
  Oligomer
agaaguggacgcaacuuaagcug

SEQ ID NO: 16104 - RNA, 23 nt, artificial
  Oligomer
cagaaguggacgcaacuuaagcu

SEQ ID NO: 16105 - RNA, 23 nt, artificial
  Oligomer
ccagaaguggacgcaacuuaagc

SEQ ID NO: 16106 - RNA, 23 nt, artificial
  Oligomer
accagaaguggacgcaacuuaag

SEQ ID NO: 16107 - RNA, 23 nt, artificial
  Oligomer
gaccagaaguggacgcaacuuaa

SEQ ID NO: 16108 - RNA, 23 nt, artificial
  Oligomer
aucaagguguuuugaaaugcaga

SEQ ID NO: 16109 - RNA, 23 nt, artificial
  Oligomer
gaucaagguguuuugaaaugcag

SEQ ID NO: 16110 - RNA, 23 nt, artificial
  Oligomer
ugaucaagguguuuugaaaugca

SEQ ID NO: 16111 - RNA, 23 nt, artificial
  Oligomer
gagagauugagaagggaaagugu

SEQ ID NO: 16112 - RNA, 23 nt, artificial
  Oligomer
ugagagauugagaagggaaagug

SEQ ID NO: 16113 - RNA, 23 nt, artificial
  Oligomer
augagagauugagaagggaaagu

SEQ ID NO: 16114 - RNA, 23 nt, artificial
  Oligomer
aaugagagauugagaagggaaag

SEQ ID NO: 16115 - RNA, 23 nt, artificial
  Oligomer
gaaugagagauugagaagggaaa

SEQ ID NO: 16116 - RNA, 23 nt, artificial
  Oligomer
gguucauauuggacugauaaucu

SEQ ID NO: 16117 - RNA, 23 nt, artificial
  Oligomer
ugguucauauuggacugauaauc

SEQ ID NO: 16118 - RNA, 23 nt, artificial
  Oligomer
cugguucauauuggacugauaau

SEQ ID NO: 16119 - RNA, 23 nt, artificial
  Oligomer
acugguucauauuggacugauaa

SEQ ID NO: 16120 - RNA, 23 nt, artificial
  Oligomer
aacugguucauauuggacugaua

SEQ ID NO: 16121 - RNA, 23 nt, artificial
  Oligomer
ggaagugucuagaggaauauggu

SEQ ID NO: 16122 - RNA, 23 nt, artificial
  Oligomer
aggaagugucuagaggaauaugg

SEQ ID NO: 16123 - RNA, 23 nt, artificial
  Oligomer
caggaagugucuagaggaauaug

SEQ ID NO: 16124 - RNA, 23 nt, artificial
  Oligomer
gcaggaagugucuagaggaauau

SEQ ID NO: 16125 - RNA, 23 nt, artificial
  Oligomer
ugcaggaagugucuagaggaaua

SEQ ID NO: 16126 - RNA, 23 nt, artificial
  Oligomer
gguacagcagaaaggagaacuau

SEQ ID NO: 16127 - RNA, 23 nt, artificial
  Oligomer
agguacagcagaaaggagaacua

SEQ ID NO: 16128 - RNA, 23 nt, artificial
  Oligomer
gagguacagcagaaaggagaacu

SEQ ID NO: 16129 - RNA, 23 nt, artificial
  Oligomer
ugagguacagcagaaaggagaac

SEQ ID NO: 16130 - RNA, 23 nt, artificial
  Oligomer
augagguacagcagaaaggagaa

SEQ ID NO: 16131 - RNA, 23 nt, artificial
  Oligomer
gaauauggugggcacagaaguag

SEQ ID NO: 16132 - RNA, 23 nt, artificial
  Oligomer
ggaauauggugggcacagaagua

SEQ ID NO: 16133 - RNA, 23 nt, artificial
  Oligomer
aggaauauggugggcacagaagu

SEQ ID NO: 16134 - RNA, 23 nt, artificial
  Oligomer
gaggaauauggugggcacagaag

SEQ ID NO: 16135 - RNA, 23 nt, artificial
  Oligomer
agaggaauauggugggcacagaa

SEQ ID NO: 16136 - RNA, 23 nt, artificial
  Oligomer
gcaguaagcuaucuucaaauguc

SEQ ID NO: 16137 - RNA, 23 nt, artificial
  Oligomer
agcaguaagcuaucuucaaaugu

SEQ ID NO: 16138 - RNA, 23 nt, artificial
  Oligomer
aagcaguaagcuaucuucaaaug

SEQ ID NO: 16139 - RNA, 23 nt, artificial
  Oligomer
uaagcaguaagcuaucuucaaau

SEQ ID NO: 16140 - RNA, 23 nt, artificial
  Oligomer
cuaagcaguaagcuaucuucaaa

SEQ ID NO: 16141 - RNA, 23 nt, artificial
  Oligomer
gcagcaaacuggauuucaauaug

SEQ ID NO: 16142 - RNA, 23 nt, artificial
  Oligomer
agcagcaaacuggauuucaauau

SEQ ID NO: 16143 - RNA, 23 nt, artificial
  Oligomer
uagcagcaaacuggauuucaaua

SEQ ID NO: 16144 - RNA, 23 nt, artificial
  Oligomer
uuagcagcaaacuggauuucaau

SEQ ID NO: 16145 - RNA, 23 nt, artificial
  Oligomer
guuagcagcaaacuggauuucaa

SEQ ID NO: 16146 - RNA, 23 nt, artificial
  Oligomer
gggaagaaacaaaguugaaccgu

SEQ ID NO: 16147 - RNA, 23 nt, artificial
  Oligomer
agggaagaaacaaaguugaaccg

SEQ ID NO: 16148 - RNA, 23 nt, artificial
  Oligomer
aagggaagaaacaaaguugaacc

SEQ ID NO: 16149 - RNA, 23 nt, artificial
  Oligomer
uaagggaagaaacaaaguugaac

SEQ ID NO: 16150 - RNA, 23 nt, artificial
  Oligomer
cuaagggaagaaacaaaguugaa

SEQ ID NO: 16151 - RNA, 23 nt, artificial
  Oligomer
cagcaauacuaagggaagaaaca

SEQ ID NO: 16152 - RNA, 23 nt, artificial
  Oligomer
ucagcaauacuaagggaagaaac

SEQ ID NO: 16153 - RNA, 23 nt, artificial
  Oligomer
gucagcaauacuaagggaagaaa

SEQ ID NO: 16154 - RNA, 23 nt, artificial
  Oligomer
ugucagcaauacuaagggaagaa

SEQ ID NO: 16155 - RNA, 23 nt, artificial
  Oligomer
uugucagcaauacuaagggaaga

SEQ ID NO: 16156 - RNA, 23 nt, artificial
  Oligomer
gcuccuguguaaaacuauauucu

SEQ ID NO: 16157 - RNA, 23 nt, artificial
  Oligomer
ugcuccuguguaaaacuauauuc

SEQ ID NO: 16158 - RNA, 23 nt, artificial
  Oligomer
uugcuccuguguaaaacuauauu

SEQ ID NO: 16159 - RNA, 23 nt, artificial
  Oligomer
cuugcuccuguguaaaacuauau

SEQ ID NO: 16160 - RNA, 23 nt, artificial
  Oligomer
ccuugcuccuguguaaaacuaua

SEQ ID NO: 16161 - RNA, 23 nt, artificial
  Oligomer
gucuuacccugaaaucaaaggau

SEQ ID NO: 16162 - RNA, 23 nt, artificial
  Oligomer
agucuuacccugaaaucaaagga

SEQ ID NO: 16163 - RNA, 23 nt, artificial
  Oligomer
gagucuuacccugaaaucaaagg

SEQ ID NO: 16164 - RNA, 23 nt, artificial
  Oligomer
ggagucuuacccugaaaucaaag

SEQ ID NO: 16165 - RNA, 23 nt, artificial
  Oligomer
uggagucuuacccugaaaucaaa

SEQ ID NO: 16166 - RNA, 23 nt, artificial
  Oligomer
ggaaaauggagaagaauuaaaug

SEQ ID NO: 16167 - RNA, 23 nt, artificial
  Oligomer
uggaaaauggagaagaauuaaau

SEQ ID NO: 16168 - RNA, 23 nt, artificial
  Oligomer
uuggaaaauggagaagaauuaaa

SEQ ID NO: 16169 - RNA, 23 nt, artificial
  Oligomer
guuggaaaauggagaagaauuaa

SEQ ID NO: 16170 - RNA, 23 nt, artificial
  Oligomer
gguuggaaaauggagaagaauua

SEQ ID NO: 16171 - RNA, 23 nt, artificial
  Oligomer
gaagauuacccaaagaaaaagug

SEQ ID NO: 16172 - RNA, 23 nt, artificial
  Oligomer
ugaagauuacccaaagaaaaagu

SEQ ID NO: 16173 - RNA, 23 nt, artificial
  Oligomer
cugaagauuacccaaagaaaaag

SEQ ID NO: 16174 - RNA, 23 nt, artificial
  Oligomer
ucugaagauuacccaaagaaaaa

SEQ ID NO: 16175 - RNA, 23 nt, artificial
  Oligomer
cucugaagauuacccaaagaaaa

SEQ ID NO: 16176 - RNA, 23 nt, artificial
  Oligomer
cgugaccaaggaagugaaagaag

SEQ ID NO: 16177 - RNA, 23 nt, artificial
  Oligomer
acgugaccaaggaagugaaagaa

SEQ ID NO: 16178 - RNA, 23 nt, artificial
  Oligomer
cacgugaccaaggaagugaaaga

SEQ ID NO: 16179 - RNA, 23 nt, artificial
  Oligomer
ccacgugaccaaggaagugaaag

SEQ ID NO: 16180 - RNA, 23 nt, artificial
  Oligomer
uccacgugaccaaggaagugaaa

SEQ ID NO: 16181 - RNA, 23 nt, artificial
  Oligomer
uugaucaagguguuuugaaaugc

SEQ ID NO: 16182 - RNA, 23 nt, artificial
  Oligomer
cuugaucaagguguuuugaaaug

SEQ ID NO: 16183 - RNA, 23 nt, artificial
  Oligomer
ccuugaucaagguguuuugaaau

SEQ ID NO: 16184 - RNA, 23 nt, artificial
  Oligomer
accuugaucaagguguuuugaaa

SEQ ID NO: 16185 - RNA, 23 nt, artificial
  Oligomer
uugcaggaagugucuagaggaau

SEQ ID NO: 16186 - RNA, 23 nt, artificial
  Oligomer
uuugcaggaagugucuagaggaa

SEQ ID NO: 16187 - RNA, 23 nt, artificial
  Oligomer
cagagaggucuaacaccaacaua

SEQ ID NO: 16188 - RNA, 23 nt, artificial
  Oligomer
gcagagaggucuaacaccaacau

SEQ ID NO: 16189 - RNA, 23 nt, artificial
  Oligomer
ggcagagaggucuaacaccaaca

SEQ ID NO: 16190 - RNA, 23 nt, artificial
  Oligomer
gggcagagaggucuaacaccaac

SEQ ID NO: 16191 - RNA, 23 nt, artificial
  Oligomer
agggcagagaggucuaacaccaa

SEQ ID NO: 16192 - RNA, 23 nt, artificial
  Oligomer
gagagaaggaggaaugagagauu

SEQ ID NO: 16193 - RNA, 23 nt, artificial
  Oligomer
agagagaaggaggaaugagagau

SEQ ID NO: 16194 - RNA, 23 nt, artificial
  Oligomer
gagagagaaggaggaaugagaga

SEQ ID NO: 16195 - RNA, 23 nt, artificial
  Oligomer
agagagagaaggaggaaugagag

SEQ ID NO: 16196 - RNA, 23 nt, artificial
  Oligomer
cagagagagaaggaggaaugaga

SEQ ID NO: 16197 - RNA, 23 nt, artificial
  Oligomer
ccaagaugcagagagagaaggag

SEQ ID NO: 16198 - RNA, 23 nt, artificial
  Oligomer
cccaagaugcagagagagaagga

SEQ ID NO: 16199 - RNA, 23 nt, artificial
  Oligomer
ccccaagaugcagagagagaagg

SEQ ID NO: 16200 - RNA, 23 nt, artificial
  Oligomer
gccccaagaugcagagagagaag

SEQ ID NO: 16201 - RNA, 23 nt, artificial
  Oligomer
ugccccaagaugcagagagagaa

SEQ ID NO: 16202 - RNA, 23 nt, artificial
  Oligomer
caucaaguauggacauuuaagag

SEQ ID NO: 16203 - RNA, 23 nt, artificial
  Oligomer
ucaucaaguauggacauuuaaga

SEQ ID NO: 16204 - RNA, 23 nt, artificial
  Oligomer
cucaucaaguauggacauuuaag

SEQ ID NO: 16205 - RNA, 23 nt, artificial
  Oligomer
ucucaucaaguauggacauuuaa

SEQ ID NO: 16206 - RNA, 23 nt, artificial
  Oligomer
gucucaucaaguauggacauuua

SEQ ID NO: 16207 - RNA, 23 nt, artificial
  Oligomer
ggagaagaauuaaaugccaucaa

SEQ ID NO: 16208 - RNA, 23 nt, artificial
  Oligomer
uggagaagaauuaaaugccauca

SEQ ID NO: 16209 - RNA, 23 nt, artificial
  Oligomer
auggagaagaauuaaaugccauc

SEQ ID NO: 16210 - RNA, 23 nt, artificial
  Oligomer
aauggagaagaauuaaaugccau

SEQ ID NO: 16211 - RNA, 23 nt, artificial
  Oligomer
aaauggagaagaauuaaaugcca

SEQ ID NO: 16212 - RNA, 23 nt, artificial
  Oligomer
ugguuggaaaauggagaagaauu

SEQ ID NO: 16213 - RNA, 23 nt, artificial
  Oligomer
cugguuggaaaauggagaagaau

SEQ ID NO: 16214 - RNA, 23 nt, artificial
  Oligomer
ccugguuggaaaauggagaagaa

SEQ ID NO: 16215 - RNA, 23 nt, artificial
  Oligomer
uggcaaaaggagaagaaaauggu

SEQ ID NO: 16216 - RNA, 23 nt, artificial
  Oligomer
cuggcaaaaggagaagaaaaugg

SEQ ID NO: 16217 - RNA, 23 nt, artificial
  Oligomer
acuggcaaaaggagaagaaaaug

SEQ ID NO: 16218 - RNA, 23 nt, artificial
  Oligomer
uacuggcaaaaggagaagaaaau

SEQ ID NO: 16219 - RNA, 23 nt, artificial
  Oligomer
cuacuggcaaaaggagaagaaaa

SEQ ID NO: 16220 - RNA, 23 nt, artificial
  Oligomer
ggaaguauggcaugaacaucuuu

SEQ ID NO: 16221 - RNA, 23 nt, artificial
  Oligomer
aggaaguauggcaugaacaucuu

SEQ ID NO: 16222 - RNA, 23 nt, artificial
  Oligomer
uaggaaguauggcaugaacaucu

SEQ ID NO: 16223 - RNA, 23 nt, artificial
  Oligomer
auaggaaguauggcaugaacauc

SEQ ID NO: 16224 - RNA, 23 nt, artificial
  Oligomer
cauaggaaguauggcaugaacau

SEQ ID NO: 16225 - RNA, 23 nt, artificial
  Oligomer
ccaucuuugauaucacuaauaac

SEQ ID NO: 16226 - RNA, 23 nt, artificial
  Oligomer
accaucuuugauaucacuaauaa

SEQ ID NO: 16227 - RNA, 23 nt, artificial
  Oligomer
gaccaucuuugauaucacuaaua

SEQ ID NO: 16228 - RNA, 23 nt, artificial
  Oligomer
ggaccaucuuugauaucacuaau

SEQ ID NO: 16229 - RNA, 23 nt, artificial
  Oligomer
cggaccaucuuugauaucacuaa

SEQ ID NO: 16230 - RNA, 23 nt, artificial
  Oligomer
ucuacuggcaaaaggagaagaaa

SEQ ID NO: 16231 - RNA, 23 nt, artificial
  Oligomer
gcaucuacuggcaaaaggagaag

SEQ ID NO: 16232 - RNA, 23 nt, artificial
  Oligomer
cgcaucuacuggcaaaaggagaa

SEQ ID NO: 16233 - RNA, 23 nt, artificial
  Oligomer
ucgcaucuacuggcaaaaggaga

SEQ ID NO: 16234 - RNA, 23 nt, artificial
  Oligomer
cucgcaucuacuggcaaaaggag

SEQ ID NO: 16235 - RNA, 23 nt, artificial
  Oligomer
acucgcaucuacuggcaaaagga

SEQ ID NO: 16236 - RNA, 23 nt, artificial
  Oligomer
ggaguugaacagcaaaagaagac

SEQ ID NO: 16237 - RNA, 23 nt, artificial
  Oligomer
uggaguugaacagcaaaagaaga

SEQ ID NO: 16238 - RNA, 23 nt, artificial
  Oligomer
cuggaguugaacagcaaaagaag

SEQ ID NO: 16239 - RNA, 23 nt, artificial
  Oligomer
ucuggaguugaacagcaaaagaa

SEQ ID NO: 16240 - RNA, 23 nt, artificial
  Oligomer
aucuggaguugaacagcaaaaga

SEQ ID NO: 16241 - RNA, 23 nt, artificial
  Oligomer
gagacuaucugauuuccuaaugu

SEQ ID NO: 16242 - RNA, 23 nt, artificial
  Oligomer
agagacuaucugauuuccuaaug

SEQ ID NO: 16243 - RNA, 23 nt, artificial
  Oligomer
cagagacuaucugauuuccuaau

SEQ ID NO: 16244 - RNA, 23 nt, artificial
  Oligomer
ucagagacuaucugauuuccuaa

SEQ ID NO: 16245 - RNA, 23 nt, artificial
  Oligomer
uucagagacuaucugauuuccua

SEQ ID NO: 16246 - RNA, 23 nt, artificial
  Oligomer
agugcugcuggaaguagaauuug

SEQ ID NO: 16247 - RNA, 23 nt, artificial
  Oligomer
aagugcugcuggaaguagaauuu

SEQ ID NO: 16248 - RNA, 23 nt, artificial
  Oligomer
aaagugcugcuggaaguagaauu

SEQ ID NO: 16249 - RNA, 23 nt, artificial
  Oligomer
caaagugcugcuggaaguagaau

SEQ ID NO: 16250 - RNA, 23 nt, artificial
  Oligomer
gcaaagugcugcuggaaguagaa

SEQ ID NO: 16251 - RNA, 23 nt, artificial
  Oligomer
uagaggaauauggugggcacaga

SEQ ID NO: 16252 - RNA, 23 nt, artificial
  Oligomer
aaguguacgcccuguauaacagu

SEQ ID NO: 16253 - RNA, 23 nt, artificial
  Oligomer
aaaguguacgcccuguauaacag

SEQ ID NO: 16254 - RNA, 23 nt, artificial
  Oligomer
gaaaguguacgcccuguauaaca

SEQ ID NO: 16255 - RNA, 23 nt, artificial
  Oligomer
ggaaaguguacgcccuguauaac

SEQ ID NO: 16256 - RNA, 23 nt, artificial
  Oligomer
gggaaaguguacgcccuguauaa

SEQ ID NO: 16257 - RNA, 23 nt, artificial
  Oligomer
ucucugaagauuacccaaagaaa

SEQ ID NO: 16258 - RNA, 23 nt, artificial
  Oligomer
cacauggcugggauuuaaagccu

SEQ ID NO: 16259 - RNA, 23 nt, artificial
  Oligomer
ccacauggcugggauuuaaagcc

SEQ ID NO: 16260 - RNA, 23 nt, artificial
  Oligomer
gccacauggcugggauuuaaagc

SEQ ID NO: 16261 - RNA, 23 nt, artificial
  Oligomer
agccacauggcugggauuuaaag

SEQ ID NO: 16262 - RNA, 23 nt, artificial
  Oligomer
aagccacauggcugggauuuaaa

SEQ ID NO: 16263 - RNA, 23 nt, artificial
  Oligomer
gaggugacccgaauuauaaaggc

SEQ ID NO: 16264 - RNA, 23 nt, artificial
  Oligomer
ccaguguuauuaaugacaaaggc

SEQ ID NO: 16265 - RNA, 23 nt, artificial
  Oligomer
accaguguuauuaaugacaaagg

SEQ ID NO: 16266 - RNA, 23 nt, artificial
  Oligomer
uaccaguguuauuaaugacaaag

SEQ ID NO: 16267 - RNA, 23 nt, artificial
  Oligomer
auaccaguguuauuaaugacaaa

SEQ ID NO: 16268 - RNA, 23 nt, artificial
  Oligomer
aauaccaguguuauuaaugacaa

SEQ ID NO: 16269 - RNA, 23 nt, artificial
  Oligomer
gaggaaugagagauugagaaggg

SEQ ID NO: 16270 - RNA, 23 nt, artificial
  Oligomer
ggaggaaugagagauugagaagg

SEQ ID NO: 16271 - RNA, 23 nt, artificial
  Oligomer
aggaggaaugagagauugagaag

SEQ ID NO: 16272 - RNA, 23 nt, artificial
  Oligomer
aaggaggaaugagagauugagaa

SEQ ID NO: 16273 - RNA, 23 nt, artificial
  Oligomer
gaaggaggaaugagagauugaga

SEQ ID NO: 16274 - RNA, 23 nt, artificial
  Oligomer
ccaagauccugaaacugagcucu

SEQ ID NO: 16275 - RNA, 23 nt, artificial
  Oligomer
cccaagauccugaaacugagcuc

SEQ ID NO: 16276 - RNA, 23 nt, artificial
  Oligomer
ucccaagauccugaaacugagcu

SEQ ID NO: 16277 - RNA, 23 nt, artificial
  Oligomer
uucccaagauccugaaacugagc

SEQ ID NO: 16278 - RNA, 23 nt, artificial
  Oligomer
uuucccaagauccugaaacugag

SEQ ID NO: 16279 - RNA, 23 nt, artificial
  Oligomer
ggcaaaaggagaagaaaauggug

SEQ ID NO: 16280 - RNA, 23 nt, artificial
  Oligomer
aaaccuugcuccuguguaaaacu

SEQ ID NO: 16281 - RNA, 23 nt, artificial
  Oligomer
caaaccuugcuccuguguaaaac

SEQ ID NO: 16282 - RNA, 23 nt, artificial
  Oligomer
acaaaccuugcuccuguguaaaa

SEQ ID NO: 16283 - RNA, 23 nt, artificial
  Oligomer
cacaaaccuugcuccuguguaaa

SEQ ID NO: 16284 - RNA, 23 nt, artificial
  Oligomer
ucacaaaccuugcuccuguguaa

SEQ ID NO: 16285 - RNA, 23 nt, artificial
  Oligomer
acgucaaagcaguagucaaggag

SEQ ID NO: 16286 - RNA, 23 nt, artificial
  Oligomer
uacgucaaagcaguagucaagga

SEQ ID NO: 16287 - RNA, 23 nt, artificial
  Oligomer
guacgucaaagcaguagucaagg

SEQ ID NO: 16288 - RNA, 23 nt, artificial
  Oligomer
gguacgucaaagcaguagucaag

SEQ ID NO: 16289 - RNA, 23 nt, artificial
  Oligomer
agguacgucaaagcaguagucaa

SEQ ID NO: 16290 - RNA, 23 nt, artificial
  Oligomer
cauauauaugucaggcaaagugc

SEQ ID NO: 16291 - RNA, 23 nt, artificial
  Oligomer
acauauauaugucaggcaaagug

SEQ ID NO: 16292 - RNA, 23 nt, artificial
  Oligomer
uacauauauaugucaggcaaagu

SEQ ID NO: 16293 - RNA, 23 nt, artificial
  Oligomer
auacauauauaugucaggcaaag

SEQ ID NO: 16294 - RNA, 23 nt, artificial
  Oligomer
uauacauauauaugucaggcaaa

SEQ ID NO: 16295 - RNA, 23 nt, artificial
  Oligomer
ggaauacaaccaagcaagagcau

SEQ ID NO: 16296 - RNA, 23 nt, artificial
  Oligomer
uggaauacaaccaagcaagagca

SEQ ID NO: 16297 - RNA, 23 nt, artificial
  Oligomer
cuggaauacaaccaagcaagagc

SEQ ID NO: 16298 - RNA, 23 nt, artificial
  Oligomer
acuggaauacaaccaagcaagag

SEQ ID NO: 16299 - RNA, 23 nt, artificial
  Oligomer
aacuggaauacaaccaagcaaga

SEQ ID NO: 16300 - RNA, 23 nt, artificial
  Oligomer
cuaugcuguuagcagcaaacugg

SEQ ID NO: 16301 - RNA, 23 nt, artificial
  Oligomer
ucuaugcuguuagcagcaaacug

SEQ ID NO: 16302 - RNA, 23 nt, artificial
  Oligomer
cucuaugcuguuagcagcaaacu

SEQ ID NO: 16303 - RNA, 23 nt, artificial
  Oligomer
gcucuaugcuguuagcagcaaac

SEQ ID NO: 16304 - RNA, 23 nt, artificial
  Oligomer
agcucuaugcuguuagcagcaaa

SEQ ID NO: 16305 - RNA, 23 nt, artificial
  Oligomer
ggaagugaaagaaguggcaacgc

SEQ ID NO: 16306 - RNA, 23 nt, artificial
  Oligomer
aggaagugaaagaaguggcaacg

SEQ ID NO: 16307 - RNA, 23 nt, artificial
  Oligomer
aaggaagugaaagaaguggcaac

SEQ ID NO: 16308 - RNA, 23 nt, artificial
  Oligomer
caaggaagugaaagaaguggcaa

SEQ ID NO: 16309 - RNA, 23 nt, artificial
  Oligomer
ccaaggaagugaaagaaguggca

SEQ ID NO: 16310 - RNA, 23 nt, artificial
  Oligomer
auccacgugaccaaggaagugaa

SEQ ID NO: 16311 - RNA, 23 nt, artificial
  Oligomer
aaguugaaccguuucuuuaauaa

SEQ ID NO: 16312 - RNA, 23 nt, artificial
  Oligomer
aaaguugaaccguuucuuuaaua

SEQ ID NO: 16313 - RNA, 23 nt, artificial
  Oligomer
caaaguugaaccguuucuuuaau

SEQ ID NO: 16314 - RNA, 23 nt, artificial
  Oligomer
acaaaguugaaccguuucuuuaa

SEQ ID NO: 16315 - RNA, 23 nt, artificial
  Oligomer
gaucguuguuuacaguguaugua

SEQ ID NO: 16316 - RNA, 23 nt, artificial
  Oligomer
agaucguuguuuacaguguaugu

SEQ ID NO: 16317 - RNA, 23 nt, artificial
  Oligomer
gagaucguuguuuacaguguaug

SEQ ID NO: 16318 - RNA, 23 nt, artificial
  Oligomer
ugagaucguuguuuacaguguau

SEQ ID NO: 16319 - RNA, 23 nt, artificial
  Oligomer
augagaucguuguuuacagugua

SEQ ID NO: 16320 - RNA, 23 nt, artificial
  Oligomer
gaggaaagggauaguccaaagac

SEQ ID NO: 16321 - RNA, 23 nt, artificial
  Oligomer
ggaggaaagggauaguccaaaga

SEQ ID NO: 16322 - RNA, 23 nt, artificial
  Oligomer
aggaggaaagggauaguccaaag

SEQ ID NO: 16323 - RNA, 23 nt, artificial
  Oligomer
aaggaggaaagggauaguccaaa

SEQ ID NO: 16324 - RNA, 23 nt, artificial
  Oligomer
caaggaggaaagggauaguccaa

SEQ ID NO: 16325 - RNA, 23 nt, artificial
  Oligomer
gaaaggagaacuauccaaaacua

SEQ ID NO: 16326 - RNA, 23 nt, artificial
  Oligomer
agaaaggagaacuauccaaaacu

SEQ ID NO: 16327 - RNA, 23 nt, artificial
  Oligomer
cagaaaggagaacuauccaaaac

SEQ ID NO: 16328 - RNA, 23 nt, artificial
  Oligomer
gcagaaaggagaacuauccaaaa

SEQ ID NO: 16329 - RNA, 23 nt, artificial
  Oligomer
agcagaaaggagaacuauccaaa

SEQ ID NO: 16330 - RNA, 23 nt, artificial
  Oligomer
ggagacuaauggaaauauuauug

SEQ ID NO: 16331 - RNA, 23 nt, artificial
  Oligomer
aggagacuaauggaaauauuauu

SEQ ID NO: 16332 - RNA, 23 nt, artificial
  Oligomer
uaggagacuaauggaaauauuau

SEQ ID NO: 16333 - RNA, 23 nt, artificial
  Oligomer
uuaggagacuaauggaaauauua

SEQ ID NO: 16334 - RNA, 23 nt, artificial
  Oligomer
uuuaggagacuaauggaaauauu

SEQ ID NO: 16335 - RNA, 23 nt, artificial
  Oligomer
ggaagggacuuuagagaauacca

SEQ ID NO: 16336 - RNA, 23 nt, artificial
  Oligomer
uggaagggacuuuagagaauacc

SEQ ID NO: 16337 - RNA, 23 nt, artificial
  Oligomer
cuggaagggacuuuagagaauac

SEQ ID NO: 16338 - RNA, 23 nt, artificial
  Oligomer
ucuggaagggacuuuagagaaua

SEQ ID NO: 16339 - RNA, 23 nt, artificial
  Oligomer
uucuggaagggacuuuagagaau

SEQ ID NO: 16340 - RNA, 23 nt, artificial
  Oligomer
acgaguguguuguucugaaguau

SEQ ID NO: 16341 - RNA, 23 nt, artificial
  Oligomer
uacgaguguguuguucugaagua

SEQ ID NO: 16342 - RNA, 23 nt, artificial
  Oligomer
auacgaguguguuguucugaagu

SEQ ID NO: 16343 - RNA, 23 nt, artificial
  Oligomer
cauacgaguguguuguucugaag

SEQ ID NO: 16344 - RNA, 23 nt, artificial
  Oligomer
acauacgaguguguuguucugaa

SEQ ID NO: 16345 - RNA, 23 nt, artificial
  Oligomer
gaguugaacagcaaaagaagaca

SEQ ID NO: 16346 - RNA, 23 nt, artificial
  Oligomer
cugaaaaucuggaguugaacagc

SEQ ID NO: 16347 - RNA, 23 nt, artificial
  Oligomer
ucugaaaaucuggaguugaacag

SEQ ID NO: 16348 - RNA, 23 nt, artificial
  Oligomer
aucugaaaaucuggaguugaaca

SEQ ID NO: 16349 - RNA, 23 nt, artificial
  Oligomer
caucugaaaaucuggaguugaac

SEQ ID NO: 16350 - RNA, 23 nt, artificial
  Oligomer
ucaucugaaaaucuggaguugaa

SEQ ID NO: 16351 - RNA, 23 nt, artificial
  Oligomer
guuugaccucauuuguaaaauau

SEQ ID NO: 16352 - RNA, 23 nt, artificial
  Oligomer
aguuugaccucauuuguaaaaua

SEQ ID NO: 16353 - RNA, 23 nt, artificial
  Oligomer
uaguuugaccucauuuguaaaau

SEQ ID NO: 16354 - RNA, 23 nt, artificial
  Oligomer
cuaguuugaccucauuuguaaaa

SEQ ID NO: 16355 - RNA, 23 nt, artificial
  Oligomer
gcuaguuugaccucauuuguaaa

SEQ ID NO: 16356 - RNA, 23 nt, artificial
  Oligomer
ucaaggaggaaagggauagucca

SEQ ID NO: 16357 - RNA, 23 nt, artificial
  Oligomer
cuuugcaggaagugucuagagga

SEQ ID NO: 16358 - RNA, 23 nt, artificial
  Oligomer
aguggagucuuacccugaaauca

SEQ ID NO: 16359 - RNA, 23 nt, artificial
  Oligomer
aaguggagucuuacccugaaauc

SEQ ID NO: 16360 - RNA, 23 nt, artificial
  Oligomer
gaaguggagucuuacccugaaau

SEQ ID NO: 16361 - RNA, 23 nt, artificial
  Oligomer
agaaguggagucuuacccugaaa

SEQ ID NO: 16362 - RNA, 23 nt, artificial
  Oligomer
cagaaguggagucuuacccugaa

SEQ ID NO: 16363 - RNA, 23 nt, artificial
  Oligomer
gcauuuuccugauaaccugcucc

SEQ ID NO: 16364 - RNA, 23 nt, artificial
  Oligomer
agcauuuuccugauaaccugcuc

SEQ ID NO: 16365 - RNA, 23 nt, artificial
  Oligomer
gagcauuuuccugauaaccugcu

SEQ ID NO: 16366 - RNA, 23 nt, artificial
  Oligomer
agagcauuuuccugauaaccugc

SEQ ID NO: 16367 - RNA, 23 nt, artificial
  Oligomer
aagagcauuuuccugauaaccug

SEQ ID NO: 16368 - RNA, 23 nt, artificial
  Oligomer
agaaaauggugcugacuaugaug

SEQ ID NO: 16369 - RNA, 23 nt, artificial
  Oligomer
aagaaaauggugcugacuaugau

SEQ ID NO: 16370 - RNA, 23 nt, artificial
  Oligomer
gaagaaaauggugcugacuauga

SEQ ID NO: 16371 - RNA, 23 nt, artificial
  Oligomer
agaagaaaauggugcugacuaug

SEQ ID NO: 16372 - RNA, 23 nt, artificial
  Oligomer
gagaagaaaauggugcugacuau

SEQ ID NO: 16373 - RNA, 23 nt, artificial
  Oligomer
aguacugagugaacucaaacccu

SEQ ID NO: 16374 - RNA, 23 nt, artificial
  Oligomer
aaguacugagugaacucaaaccc

SEQ ID NO: 16375 - RNA, 23 nt, artificial
  Oligomer
caaguacugagugaacucaaacc

SEQ ID NO: 16376 - RNA, 23 nt, artificial
  Oligomer
acaaguacugagugaacucaaac

SEQ ID NO: 16377 - RNA, 23 nt, artificial
  Oligomer
gacaaguacugagugaacucaaa

SEQ ID NO: 16378 - RNA, 23 nt, artificial
  Oligomer
uaagccacauggcugggauuuaa

SEQ ID NO: 16379 - RNA, 23 nt, artificial
  Oligomer
ugcuaguuugaccucauuuguaa

SEQ ID NO: 16380 - RNA, 23 nt, artificial
  Oligomer
aggugacccgaauuauaaaggcc

SEQ ID NO: 16381 - RNA, 23 nt, artificial
  Oligomer
gcucuuaggugcuucuucacuuc

SEQ ID NO: 16382 - RNA, 23 nt, artificial
  Oligomer
ugcucuuaggugcuucuucacuu

SEQ ID NO: 16383 - RNA, 23 nt, artificial
  Oligomer
cugcucuuaggugcuucuucacu

SEQ ID NO: 16384 - RNA, 23 nt, artificial
  Oligomer
ucugcucuuaggugcuucuucac

SEQ ID NO: 16385 - RNA, 23 nt, artificial
  Oligomer
aucugcucuuaggugcuucuuca

SEQ ID NO: 16386 - RNA, 23 nt, artificial
  Oligomer
ccaccuugcccuuuacguaucug

SEQ ID NO: 16387 - RNA, 23 nt, artificial
  Oligomer
cccaccuugcccuuuacguaucu

SEQ ID NO: 16388 - RNA, 23 nt, artificial
  Oligomer
ccccaccuugcccuuuacguauc

SEQ ID NO: 16389 - RNA, 23 nt, artificial
  Oligomer
accccaccuugcccuuuacguau

SEQ ID NO: 16390 - RNA, 23 nt, artificial
  Oligomer
uaccccaccuugcccuuuacgua

SEQ ID NO: 16391 - RNA, 23 nt, artificial
  Oligomer
cauuuaagagugaaucagaccuu

SEQ ID NO: 16392 - RNA, 23 nt, artificial
  Oligomer
acauuuaagagugaaucagaccu

SEQ ID NO: 16393 - RNA, 23 nt, artificial
  Oligomer
gacauuuaagagugaaucagacc

SEQ ID NO: 16394 - RNA, 23 nt, artificial
  Oligomer
ggacauuuaagagugaaucagac

SEQ ID NO: 16395 - RNA, 23 nt, artificial
  Oligomer
uggacauuuaagagugaaucaga

SEQ ID NO: 16396 - RNA, 23 nt, artificial
  Oligomer
cuuucacuuuugacccuaagcau

SEQ ID NO: 16397 - RNA, 23 nt, artificial
  Oligomer
gcuuucacuuuugacccuaagca

SEQ ID NO: 16398 - RNA, 23 nt, artificial
  Oligomer
ggcuuucacuuuugacccuaagc

SEQ ID NO: 16399 - RNA, 23 nt, artificial
  Oligomer
uggcuuucacuuuugacccuaag

SEQ ID NO: 16400 - RNA, 23 nt, artificial
  Oligomer
uuggcuuucacuuuugacccuaa

SEQ ID NO: 16401 - RNA, 23 nt, artificial
  Oligomer
gggucuucuacgugagcaauugg

SEQ ID NO: 16402 - RNA, 23 nt, artificial
  Oligomer
agggucuucuacgugagcaauug

SEQ ID NO: 16403 - RNA, 23 nt, artificial
  Oligomer
gagggucuucuacgugagcaauu

SEQ ID NO: 16404 - RNA, 23 nt, artificial
  Oligomer
ggagggucuucuacgugagcaau

SEQ ID NO: 16405 - RNA, 23 nt, artificial
  Oligomer
uggagggucuucuacgugagcaa

SEQ ID NO: 16406 - RNA, 23 nt, artificial
  Oligomer
caggaauacuuaacucaauaauu

SEQ ID NO: 16407 - RNA, 23 nt, artificial
  Oligomer
acaggaauacuuaacucaauaau

SEQ ID NO: 16408 - RNA, 23 nt, artificial
  Oligomer
gacaggaauacuuaacucaauaa

SEQ ID NO: 16409 - RNA, 23 nt, artificial
  Oligomer
ugacaggaauacuuaacucaaua

SEQ ID NO: 16410 - RNA, 23 nt, artificial
  Oligomer
uugacaggaauacuuaacucaau

SEQ ID NO: 16411 - RNA, 23 nt, artificial
  Oligomer
gaaugauuuagguacgucaaagc

SEQ ID NO: 16412 - RNA, 23 nt, artificial
  Oligomer
cgaaugauuuagguacgucaaag

SEQ ID NO: 16413 - RNA, 23 nt, artificial
  Oligomer
acgaaugauuuagguacgucaaa

SEQ ID NO: 16414 - RNA, 23 nt, artificial
  Oligomer
gacgaaugauuuagguacgucaa

SEQ ID NO: 16415 - RNA, 23 nt, artificial
  Oligomer
agacgaaugauuuagguacguca

SEQ ID NO: 16416 - RNA, 23 nt, artificial
  Oligomer
gggacuuuagagaauaccagugu

SEQ ID NO: 16417 - RNA, 23 nt, artificial
  Oligomer
agggacuuuagagaauaccagug

SEQ ID NO: 16418 - RNA, 23 nt, artificial
  Oligomer
aagggacuuuagagaauaccagu

SEQ ID NO: 16419 - RNA, 23 nt, artificial
  Oligomer
gaagggacuuuagagaauaccag

SEQ ID NO: 16420 - RNA, 23 nt, artificial
  Oligomer
gagugaaucagaccuucaacugg

SEQ ID NO: 16421 - RNA, 23 nt, artificial
  Oligomer
agagugaaucagaccuucaacug

SEQ ID NO: 16422 - RNA, 23 nt, artificial
  Oligomer
aagagugaaucagaccuucaacu

SEQ ID NO: 16423 - RNA, 23 nt, artificial
  Oligomer
uaagagugaaucagaccuucaac

SEQ ID NO: 16424 - RNA, 23 nt, artificial
  Oligomer
uuaagagugaaucagaccuucaa

SEQ ID NO: 16425 - RNA, 23 nt, artificial
  Oligomer
caaguauggacauuuaagaguga

SEQ ID NO: 16426 - RNA, 23 nt, artificial
  Oligomer
ucaaguauggacauuuaagagug

SEQ ID NO: 16427 - RNA, 23 nt, artificial
  Oligomer
aucaaguauggacauuuaagagu

SEQ ID NO: 16428 - RNA, 23 nt, artificial
  Oligomer
uccugguuggaaaauggagaaga

SEQ ID NO: 16429 - RNA, 23 nt, artificial
  Oligomer
cuccugguuggaaaauggagaag

SEQ ID NO: 16430 - RNA, 23 nt, artificial
  Oligomer
ucuccugguuggaaaauggagaa

SEQ ID NO: 16431 - RNA, 23 nt, artificial
  Oligomer
cucuccugguuggaaaauggaga

SEQ ID NO: 16432 - RNA, 23 nt, artificial
  Oligomer
ucacaauguuucuguugaagagc

SEQ ID NO: 16433 - RNA, 23 nt, artificial
  Oligomer
gucacaauguuucuguugaagag

SEQ ID NO: 16434 - RNA, 23 nt, artificial
  Oligomer
ggucacaauguuucuguugaaga

SEQ ID NO: 16435 - RNA, 23 nt, artificial
  Oligomer
uggucacaauguuucuguugaag

SEQ ID NO: 16436 - RNA, 23 nt, artificial
  Oligomer
guggucacaauguuucuguugaa

SEQ ID NO: 16437 - RNA, 23 nt, artificial
  Oligomer
accaaggaagugaaagaaguggc

SEQ ID NO: 16438 - RNA, 23 nt, artificial
  Oligomer
gaccaaggaagugaaagaagugg

SEQ ID NO: 16439 - RNA, 23 nt, artificial
  Oligomer
ugaccaaggaagugaaagaagug

SEQ ID NO: 16440 - RNA, 23 nt, artificial
  Oligomer
gugaccaaggaagugaaagaagu

SEQ ID NO: 16441 - RNA, 23 nt, artificial
  Oligomer
cacaucucauggcagcuaagcca

SEQ ID NO: 16442 - RNA, 23 nt, artificial
  Oligomer
gcacaucucauggcagcuaagcc

SEQ ID NO: 16443 - RNA, 23 nt, artificial
  Oligomer
ugcacaucucauggcagcuaagc

SEQ ID NO: 16444 - RNA, 23 nt, artificial
  Oligomer
augcacaucucauggcagcuaag

SEQ ID NO: 16445 - RNA, 23 nt, artificial
  Oligomer
aaugcacaucucauggcagcuaa

SEQ ID NO: 16446 - RNA, 23 nt, artificial
  Oligomer
caugacuccuuucucuaaaacug

SEQ ID NO: 16447 - RNA, 23 nt, artificial
  Oligomer
ucaugacuccuuucucuaaaacu

SEQ ID NO: 16448 - RNA, 23 nt, artificial
  Oligomer
cucaugacuccuuucucuaaaac

SEQ ID NO: 16449 - RNA, 23 nt, artificial
  Oligomer
acucaugacuccuuucucuaaaa

SEQ ID NO: 16450 - RNA, 23 nt, artificial
  Oligomer
uacucaugacuccuuucucuaaa

SEQ ID NO: 16451 - RNA, 23 nt, artificial
  Oligomer
ggauaguccaaagacuuaacugg

SEQ ID NO: 16452 - RNA, 23 nt, artificial
  Oligomer
gggauaguccaaagacuuaacug

SEQ ID NO: 16453 - RNA, 23 nt, artificial
  Oligomer
agggauaguccaaagacuuaacu

SEQ ID NO: 16454 - RNA, 23 nt, artificial
  Oligomer
aagggauaguccaaagacuuaac

SEQ ID NO: 16455 - RNA, 23 nt, artificial
  Oligomer
aaagggauaguccaaagacuuaa

SEQ ID NO: 16456 - RNA, 23 nt, artificial
  Oligomer
gaaagggauaguccaaagacuua

SEQ ID NO: 16457 - RNA, 23 nt, artificial
  Oligomer
ggucuuacuuggguccaaauugu

SEQ ID NO: 16458 - RNA, 23 nt, artificial
  Oligomer
uggucuuacuuggguccaaauug

SEQ ID NO: 16459 - RNA, 23 nt, artificial
  Oligomer
cuggucuuacuuggguccaaauu

SEQ ID NO: 16460 - RNA, 23 nt, artificial
  Oligomer
ccuggucuuacuuggguccaaau

SEQ ID NO: 16461 - RNA, 23 nt, artificial
  Oligomer
cccuggucuuacuuggguccaaa

SEQ ID NO: 16462 - RNA, 23 nt, artificial
  Oligomer
ggacugauaaucucuuuaaaugg

SEQ ID NO: 16463 - RNA, 23 nt, artificial
  Oligomer
uggacugauaaucucuuuaaaug

SEQ ID NO: 16464 - RNA, 23 nt, artificial
  Oligomer
uuggacugauaaucucuuuaaau

SEQ ID NO: 16465 - RNA, 23 nt, artificial
  Oligomer
auuggacugauaaucucuuuaaa

SEQ ID NO: 16466 - RNA, 23 nt, artificial
  Oligomer
uauuggacugauaaucucuuuaa

SEQ ID NO: 16467 - RNA, 23 nt, artificial
  Oligomer
cucugacauguaagacgaaugau

SEQ ID NO: 16468 - RNA, 23 nt, artificial
  Oligomer
ccucugacauguaagacgaauga

SEQ ID NO: 16469 - RNA, 23 nt, artificial
  Oligomer
uccucugacauguaagacgaaug

SEQ ID NO: 16470 - RNA, 23 nt, artificial
  Oligomer
uuccucugacauguaagacgaau

SEQ ID NO: 16471 - RNA, 23 nt, artificial
  Oligomer
uuuccucugacauguaagacgaa

SEQ ID NO: 16472 - RNA, 23 nt, artificial
  Oligomer
caaaacuaauuuccucugacaug

SEQ ID NO: 16473 - RNA, 23 nt, artificial
  Oligomer
ccaaaacuaauuuccucugacau

SEQ ID NO: 16474 - RNA, 23 nt, artificial
  Oligomer
uccaaaacuaauuuccucugaca

SEQ ID NO: 16475 - RNA, 23 nt, artificial
  Oligomer
auccaaaacuaauuuccucugac

SEQ ID NO: 16476 - RNA, 23 nt, artificial
  Oligomer
uauccaaaacuaauuuccucuga

SEQ ID NO: 16477 - RNA, 23 nt, artificial
  Oligomer
ggcaaagugcugcuggaaguaga

SEQ ID NO: 16478 - RNA, 23 nt, artificial
  Oligomer
aggaaugagagauugagaaggga

SEQ ID NO: 16479 - RNA, 23 nt, artificial
  Oligomer
gcuucaugugucucaucaaguau

SEQ ID NO: 16480 - RNA, 23 nt, artificial
  Oligomer
agcuucaugugucucaucaagua

SEQ ID NO: 16481 - RNA, 23 nt, artificial
  Oligomer
cagcuucaugugucucaucaagu

SEQ ID NO: 16482 - RNA, 23 nt, artificial
  Oligomer
acagcuucaugugucucaucaag

SEQ ID NO: 16483 - RNA, 23 nt, artificial
  Oligomer
cacagcuucaugugucucaucaa

SEQ ID NO: 16484 - RNA, 23 nt, artificial
  Oligomer
cucucugaagauuacccaaagaa

SEQ ID NO: 16485 - RNA, 23 nt, artificial
  Oligomer
ccucucugaagauuacccaaaga

SEQ ID NO: 16486 - RNA, 23 nt, artificial
  Oligomer
gccucucugaagauuacccaaag

SEQ ID NO: 16487 - RNA, 23 nt, artificial
  Oligomer
cgccucucugaagauuacccaaa

SEQ ID NO: 16488 - RNA, 23 nt, artificial
  Oligomer
ucgccucucugaagauuacccaa

SEQ ID NO: 16489 - RNA, 23 nt, artificial
  Oligomer
ugcuguucauguuacucaugacu

SEQ ID NO: 16490 - RNA, 23 nt, artificial
  Oligomer
cugcuguucauguuacucaugac

SEQ ID NO: 16491 - RNA, 23 nt, artificial
  Oligomer
acugcuguucauguuacucauga

SEQ ID NO: 16492 - RNA, 23 nt, artificial
  Oligomer
aacugcuguucauguuacucaug

SEQ ID NO: 16493 - RNA, 23 nt, artificial
  Oligomer
caacugcuguucauguuacucau

SEQ ID NO: 16494 - RNA, 23 nt, artificial
  Oligomer
ccaauguaaugcauaggaaguau

SEQ ID NO: 16495 - RNA, 23 nt, artificial
  Oligomer
cccaauguaaugcauaggaagua

SEQ ID NO: 16496 - RNA, 23 nt, artificial
  Oligomer
gcccaauguaaugcauaggaagu

SEQ ID NO: 16497 - RNA, 23 nt, artificial
  Oligomer
agcccaauguaaugcauaggaag

SEQ ID NO: 16498 - RNA, 23 nt, artificial
  Oligomer
aagcccaauguaaugcauaggaa

SEQ ID NO: 16499 - RNA, 23 nt, artificial
  Oligomer
agcaagcugugaaacuaaaucca

SEQ ID NO: 16500 - RNA, 23 nt, artificial
  Oligomer
cagcaagcugugaaacuaaaucc

SEQ ID NO: 16501 - RNA, 23 nt, artificial
  Oligomer
ucagcaagcugugaaacuaaauc

SEQ ID NO: 16502 - RNA, 23 nt, artificial
  Oligomer
uucagcaagcugugaaacuaaau

SEQ ID NO: 16503 - RNA, 23 nt, artificial
  Oligomer
cuucagcaagcugugaaacuaaa

SEQ ID NO: 16504 - RNA, 23 nt, artificial
  Oligomer
agacuaucugauuuccuaauguc

SEQ ID NO: 16505 - RNA, 23 nt, artificial
  Oligomer
guggagucuuacccugaaaucaa

SEQ ID NO: 16506 - RNA, 23 nt, artificial
  Oligomer
agggaaaguguacgcccuguaua

SEQ ID NO: 16507 - RNA, 23 nt, artificial
  Oligomer
aagggaaaguguacgcccuguau

SEQ ID NO: 16508 - RNA, 23 nt, artificial
  Oligomer
gcagagagagaaggaggaaugag

SEQ ID NO: 16509 - RNA, 23 nt, artificial
  Oligomer
ugcagagagagaaggaggaauga

SEQ ID NO: 16510 - RNA, 23 nt, artificial
  Oligomer
ccuguuuugcaccugggaagugc

SEQ ID NO: 16511 - RNA, 23 nt, artificial
  Oligomer
gccuguuuugcaccugggaagug

SEQ ID NO: 16512 - RNA, 23 nt, artificial
  Oligomer
ugccuguuuugcaccugggaagu

SEQ ID NO: 16513 - RNA, 23 nt, artificial
  Oligomer
cugccuguuuugcaccugggaag

SEQ ID NO: 16514 - RNA, 23 nt, artificial
  Oligomer
ccugccuguuuugcaccugggaa

SEQ ID NO: 16515 - RNA, 23 nt, artificial
  Oligomer
auugacaggaauacuuaacucaa

SEQ ID NO: 16516 - RNA, 23 nt, artificial
  Oligomer
ccaacauaagguacuagcagugu

SEQ ID NO: 16517 - RNA, 23 nt, artificial
  Oligomer
accaacauaagguacuagcagug

SEQ ID NO: 16518 - RNA, 23 nt, artificial
  Oligomer
caccaacauaagguacuagcagu

SEQ ID NO: 16519 - RNA, 23 nt, artificial
  Oligomer
acaccaacauaagguacuagcag

SEQ ID NO: 16520 - RNA, 23 nt, artificial
  Oligomer
aacaccaacauaagguacuagca

SEQ ID NO: 16521 - RNA, 23 nt, artificial
  Oligomer
ggcuuuuucuccuugguauuucu

SEQ ID NO: 16522 - RNA, 23 nt, artificial
  Oligomer
uggcuuuuucuccuugguauuuc

SEQ ID NO: 16523 - RNA, 23 nt, artificial
  Oligomer
auggcuuuuucuccuugguauuu

SEQ ID NO: 16524 - RNA, 23 nt, artificial
  Oligomer
gauggcuuuuucuccuugguauu

SEQ ID NO: 16525 - RNA, 23 nt, artificial
  Oligomer
agauggcuuuuucuccuugguau

SEQ ID NO: 16526 - RNA, 23 nt, artificial
  Oligomer
gaacucaaacccucuguaaagua

SEQ ID NO: 16527 - RNA, 23 nt, artificial
  Oligomer
ugaacucaaacccucuguaaagu

SEQ ID NO: 16528 - RNA, 23 nt, artificial
  Oligomer
gugaacucaaacccucuguaaag

SEQ ID NO: 16529 - RNA, 23 nt, artificial
  Oligomer
agugaacucaaacccucuguaaa

SEQ ID NO: 16530 - RNA, 23 nt, artificial
  Oligomer
gagugaacucaaacccucuguaa

SEQ ID NO: 16531 - RNA, 23 nt, artificial
  Oligomer
ucuucagcaagcugugaaacuaa

SEQ ID NO: 16532 - RNA, 23 nt, artificial
  Oligomer
gucccaccuccauuugcaauuga

SEQ ID NO: 16533 - RNA, 23 nt, artificial
  Oligomer
ggucccaccuccauuugcaauug

SEQ ID NO: 16534 - RNA, 23 nt, artificial
  Oligomer
aggucccaccuccauuugcaauu

SEQ ID NO: 16535 - RNA, 23 nt, artificial
  Oligomer
aaggucccaccuccauuugcaau

SEQ ID NO: 16536 - RNA, 23 nt, artificial
  Oligomer
gaaggucccaccuccauuugcaa

SEQ ID NO: 16537 - RNA, 23 nt, artificial
  Oligomer
gaagggaaaguguacgcccugua

SEQ ID NO: 16538 - RNA, 23 nt, artificial
  Oligomer
augcagagagagaaggaggaaug

SEQ ID NO: 16539 - RNA, 23 nt, artificial
  Oligomer
gaugcagagagagaaggaggaau

SEQ ID NO: 16540 - RNA, 23 nt, artificial
  Oligomer
agaugcagagagagaaggaggaa

SEQ ID NO: 16541 - RNA, 23 nt, artificial
  Oligomer
ucaugugucucaucaaguaugga

SEQ ID NO: 16542 - RNA, 23 nt, artificial
  Oligomer
uucaugugucucaucaaguaugg

SEQ ID NO: 16543 - RNA, 23 nt, artificial
  Oligomer
cuucaugugucucaucaaguaug

SEQ ID NO: 16544 - RNA, 23 nt, artificial
  Oligomer
ccaaguguccauaccucaauuuc

SEQ ID NO: 16545 - RNA, 23 nt, artificial
  Oligomer
uccaaguguccauaccucaauuu

SEQ ID NO: 16546 - RNA, 23 nt, artificial
  Oligomer
auccaaguguccauaccucaauu

SEQ ID NO: 16547 - RNA, 23 nt, artificial
  Oligomer
cauccaaguguccauaccucaau

SEQ ID NO: 16548 - RNA, 23 nt, artificial
  Oligomer
ccauccaaguguccauaccucaa

SEQ ID NO: 16549 - RNA, 23 nt, artificial
  Oligomer
gcaauacuaagggaagaaacaaa

SEQ ID NO: 16550 - RNA, 23 nt, artificial
  Oligomer
agcaauacuaagggaagaaacaa

SEQ ID NO: 16551 - RNA, 23 nt, artificial
  Oligomer
gcagauacuuugucagcaauacu

SEQ ID NO: 16552 - RNA, 23 nt, artificial
  Oligomer
agcagauacuuugucagcaauac

SEQ ID NO: 16553 - RNA, 23 nt, artificial
  Oligomer
cagcagauacuuugucagcaaua

SEQ ID NO: 16554 - RNA, 23 nt, artificial
  Oligomer
acagcagauacuuugucagcaau

SEQ ID NO: 16555 - RNA, 23 nt, artificial
  Oligomer
uacagcagauacuuugucagcaa

SEQ ID NO: 16556 - RNA, 23 nt, artificial
  Oligomer
aaucuggaguugaacagcaaaag

SEQ ID NO: 16557 - RNA, 23 nt, artificial
  Oligomer
aaaucuggaguugaacagcaaaa

SEQ ID NO: 16558 - RNA, 23 nt, artificial
  Oligomer
agagaacuggaaagacauagcca

SEQ ID NO: 16559 - RNA, 23 nt, artificial
  Oligomer
cagagaacuggaaagacauagcc

SEQ ID NO: 16560 - RNA, 23 nt, artificial
  Oligomer
gcagagaacuggaaagacauagc

SEQ ID NO: 16561 - RNA, 23 nt, artificial
  Oligomer
agcagagaacuggaaagacauag

SEQ ID NO: 16562 - RNA, 23 nt, artificial
  Oligomer
cagcagagaacuggaaagacaua

SEQ ID NO: 16563 - RNA, 23 nt, artificial
  Oligomer
cguuaucagucaaagcugacuuc

SEQ ID NO: 16564 - RNA, 23 nt, artificial
  Oligomer
acguuaucagucaaagcugacuu

SEQ ID NO: 16565 - RNA, 23 nt, artificial
  Oligomer
gacguuaucagucaaagcugacu

SEQ ID NO: 16566 - RNA, 23 nt, artificial
  Oligomer
ugacguuaucagucaaagcugac

SEQ ID NO: 16567 - RNA, 23 nt, artificial
  Oligomer
gugacguuaucagucaaagcuga

SEQ ID NO: 16568 - RNA, 23 nt, artificial
  Oligomer
caaacccucuguaaaguaacaga

SEQ ID NO: 16569 - RNA, 23 nt, artificial
  Oligomer
ucaaacccucuguaaaguaacag

SEQ ID NO: 16570 - RNA, 23 nt, artificial
  Oligomer
cucaaacccucuguaaaguaaca

SEQ ID NO: 16571 - RNA, 23 nt, artificial
  Oligomer
acucaaacccucuguaaaguaac

SEQ ID NO: 16572 - RNA, 23 nt, artificial
  Oligomer
aacucaaacccucuguaaaguaa

SEQ ID NO: 16573 - RNA, 23 nt, artificial
  Oligomer
gaacagcaaaagaagacaacauu

SEQ ID NO: 16574 - RNA, 23 nt, artificial
  Oligomer
ugaacagcaaaagaagacaacau

SEQ ID NO: 16575 - RNA, 23 nt, artificial
  Oligomer
uugaacagcaaaagaagacaaca

SEQ ID NO: 16576 - RNA, 23 nt, artificial
  Oligomer
guugaacagcaaaagaagacaac

SEQ ID NO: 16577 - RNA, 23 nt, artificial
  Oligomer
aguugaacagcaaaagaagacaa

SEQ ID NO: 16578 - RNA, 23 nt, artificial
  Oligomer
agacuuaacugguucauauugga

SEQ ID NO: 16579 - RNA, 23 nt, artificial
  Oligomer
aagacuuaacugguucauauugg

SEQ ID NO: 16580 - RNA, 23 nt, artificial
  Oligomer
aaagacuuaacugguucauauug

SEQ ID NO: 16581 - RNA, 23 nt, artificial
  Oligomer
caaagacuuaacugguucauauu

SEQ ID NO: 16582 - RNA, 23 nt, artificial
  Oligomer
ccaaagacuuaacugguucauau

SEQ ID NO: 16583 - RNA, 23 nt, artificial
  Oligomer
gcaguagucaaggaggaaaggga

SEQ ID NO: 16584 - RNA, 23 nt, artificial
  Oligomer
agcaguagucaaggaggaaaggg

SEQ ID NO: 16585 - RNA, 23 nt, artificial
  Oligomer
aagcaguagucaaggaggaaagg

SEQ ID NO: 16586 - RNA, 23 nt, artificial
  Oligomer
aaagcaguagucaaggaggaaag

SEQ ID NO: 16587 - RNA, 23 nt, artificial
  Oligomer
caaagcaguagucaaggaggaaa

SEQ ID NO: 16588 - RNA, 23 nt, artificial
  Oligomer
uucuucagcaagcugugaaacua

SEQ ID NO: 16589 - RNA, 23 nt, artificial
  Oligomer
uuucuucagcaagcugugaaacu

SEQ ID NO: 16590 - RNA, 23 nt, artificial
  Oligomer
uuuucuucagcaagcugugaaac

SEQ ID NO: 16591 - RNA, 23 nt, artificial
  Oligomer
uuuuucuucagcaagcugugaaa

SEQ ID NO: 16592 - RNA, 23 nt, artificial
  Oligomer
caauaacaggucaacuucagaga

SEQ ID NO: 16593 - RNA, 23 nt, artificial
  Oligomer
ccaauaacaggucaacuucagag

SEQ ID NO: 16594 - RNA, 23 nt, artificial
  Oligomer
uccaauaacaggucaacuucaga

SEQ ID NO: 16595 - RNA, 23 nt, artificial
  Oligomer
guccaauaacaggucaacuucag

SEQ ID NO: 16596 - RNA, 23 nt, artificial
  Oligomer
uguccaauaacaggucaacuuca

SEQ ID NO: 16597 - RNA, 23 nt, artificial
  Oligomer
ggaaguagaauuuguccaauaac

SEQ ID NO: 16598 - RNA, 23 nt, artificial
  Oligomer
uggaaguagaauuuguccaauaa

SEQ ID NO: 16599 - RNA, 23 nt, artificial
  Oligomer
cuggaaguagaauuuguccaaua

SEQ ID NO: 16600 - RNA, 23 nt, artificial
  Oligomer
gcuggaaguagaauuuguccaau

SEQ ID NO: 16601 - RNA, 23 nt, artificial
  Oligomer
ugcuggaaguagaauuuguccaa

SEQ ID NO: 16602 - RNA, 23 nt, artificial
  Oligomer
gauugagaagggaaaguguacgc

SEQ ID NO: 16603 - RNA, 23 nt, artificial
  Oligomer
agauugagaagggaaaguguacg

SEQ ID NO: 16604 - RNA, 23 nt, artificial
  Oligomer
gagauugagaagggaaaguguac

SEQ ID NO: 16605 - RNA, 23 nt, artificial
  Oligomer
agagauugagaagggaaagugua

SEQ ID NO: 16606 - RNA, 23 nt, artificial
  Oligomer
gagaaggaggaaugagagauuga

SEQ ID NO: 16607 - RNA, 23 nt, artificial
  Oligomer
agagaaggaggaaugagagauug

SEQ ID NO: 16608 - RNA, 23 nt, artificial
  Oligomer
guguuguucugaaguaugaaaaa

SEQ ID NO: 16609 - RNA, 23 nt, artificial
  Oligomer
uguguuguucugaaguaugaaaa

SEQ ID NO: 16610 - RNA, 23 nt, artificial
  Oligomer
guguguuguucugaaguaugaaa

SEQ ID NO: 16611 - RNA, 23 nt, artificial
  Oligomer
aguguguuguucugaaguaugaa

SEQ ID NO: 16612 - RNA, 23 nt, artificial
  Oligomer
gaguguguuguucugaaguauga

SEQ ID NO: 16613 - RNA, 23 nt, artificial
  Oligomer
auauauggcccgaguacaagaac

SEQ ID NO: 16614 - RNA, 23 nt, artificial
  Oligomer
aauauauggcccgaguacaagaa

SEQ ID NO: 16615 - RNA, 23 nt, artificial
  Oligomer
gaauauauggcccgaguacaaga

SEQ ID NO: 16616 - RNA, 23 nt, artificial
  Oligomer
ugaauauauggcccgaguacaag

SEQ ID NO: 16617 - RNA, 23 nt, artificial
  Oligomer
augaauauauggcccgaguacaa

SEQ ID NO: 16618 - RNA, 23 nt, artificial
  Oligomer
uguugaagagcuggcacaaacuc

SEQ ID NO: 16619 - RNA, 23 nt, artificial
  Oligomer
cuguugaagagcuggcacaaacu

SEQ ID NO: 16620 - RNA, 23 nt, artificial
  Oligomer
ucuguugaagagcuggcacaaac

SEQ ID NO: 16621 - RNA, 23 nt, artificial
  Oligomer
uucuguugaagagcuggcacaaa

SEQ ID NO: 16622 - RNA, 23 nt, artificial
  Oligomer
uuucuguugaagagcuggcacaa

SEQ ID NO: 16623 - RNA, 23 nt, artificial
  Oligomer
uacuaagggaagaaacaaaguug

SEQ ID NO: 16624 - RNA, 23 nt, artificial
  Oligomer
auacuaagggaagaaacaaaguu

SEQ ID NO: 16625 - RNA, 23 nt, artificial
  Oligomer
aauacuaagggaagaaacaaagu

SEQ ID NO: 16626 - RNA, 23 nt, artificial
  Oligomer
caauacuaagggaagaaacaaag

SEQ ID NO: 16627 - RNA, 23 nt, artificial
  Oligomer
uccuaaugucagaguagaagauu

SEQ ID NO: 16628 - RNA, 23 nt, artificial
  Oligomer
uuccuaaugucagaguagaagau

SEQ ID NO: 16629 - RNA, 23 nt, artificial
  Oligomer
uuuccuaaugucagaguagaaga

SEQ ID NO: 16630 - RNA, 23 nt, artificial
  Oligomer
auuuccuaaugucagaguagaag

SEQ ID NO: 16631 - RNA, 23 nt, artificial
  Oligomer
gauuuccuaaugucagaguagaa

SEQ ID NO: 16632 - RNA, 23 nt, artificial
  Oligomer
uggaauuuuucuucagcaagcug

SEQ ID NO: 16633 - RNA, 23 nt, artificial
  Oligomer
guggaauuuuucuucagcaagcu

SEQ ID NO: 16634 - RNA, 23 nt, artificial
  Oligomer
aguggaauuuuucuucagcaagc

SEQ ID NO: 16635 - RNA, 23 nt, artificial
  Oligomer
aaguggaauuuuucuucagcaag

SEQ ID NO: 16636 - RNA, 23 nt, artificial
  Oligomer
aaaguggaauuuuucuucagcaa

SEQ ID NO: 16637 - RNA, 23 nt, artificial
  Oligomer
agaacaucucagaaguggagucu

SEQ ID NO: 16638 - RNA, 23 nt, artificial
  Oligomer
gagaacaucucagaaguggaguc

SEQ ID NO: 16639 - RNA, 23 nt, artificial
  Oligomer
agagaacaucucagaaguggagu

SEQ ID NO: 16640 - RNA, 23 nt, artificial
  Oligomer
aagagaacaucucagaaguggag

SEQ ID NO: 16641 - RNA, 23 nt, artificial
  Oligomer
gaagagaacaucucagaagugga

SEQ ID NO: 16642 - RNA, 23 nt, artificial
  Oligomer
ccugggccauuaccuuaaucuca

SEQ ID NO: 16643 - RNA, 23 nt, artificial
  Oligomer
uccugggccauuaccuuaaucuc

SEQ ID NO: 16644 - RNA, 23 nt, artificial
  Oligomer
auccugggccauuaccuuaaucu

SEQ ID NO: 16645 - RNA, 23 nt, artificial
  Oligomer
cauccugggccauuaccuuaauc

SEQ ID NO: 16646 - RNA, 23 nt, artificial
  Oligomer
ccauccugggccauuaccuuaau

SEQ ID NO: 16647 - RNA, 23 nt, artificial
  Oligomer
cuguuagcagcaaacuggauuuc

SEQ ID NO: 16648 - RNA, 23 nt, artificial
  Oligomer
gcuguuagcagcaaacuggauuu

SEQ ID NO: 16649 - RNA, 23 nt, artificial
  Oligomer
ugcuguuagcagcaaacuggauu

SEQ ID NO: 16650 - RNA, 23 nt, artificial
  Oligomer
augcuguuagcagcaaacuggau

SEQ ID NO: 16651 - RNA, 23 nt, artificial
  Oligomer
uaugcuguuagcagcaaacugga

SEQ ID NO: 16652 - RNA, 23 nt, artificial
  Oligomer
uguuguucugaaguaugaaaaag

SEQ ID NO: 16653 - RNA, 23 nt, artificial
  Oligomer
aaauggugcugacuaugaugucu

SEQ ID NO: 16654 - RNA, 23 nt, artificial
  Oligomer
aaaauggugcugacuaugauguc

SEQ ID NO: 16655 - RNA, 23 nt, artificial
  Oligomer
gaaaauggugcugacuaugaugu

SEQ ID NO: 16656 - RNA, 23 nt, artificial
  Oligomer
agggaacaucaccauccaagugu

SEQ ID NO: 16657 - RNA, 23 nt, artificial
  Oligomer
cagggaacaucaccauccaagug

SEQ ID NO: 16658 - RNA, 23 nt, artificial
  Oligomer
gcagggaacaucaccauccaagu

SEQ ID NO: 16659 - RNA, 23 nt, artificial
  Oligomer
ggcagggaacaucaccauccaag

SEQ ID NO: 16660 - RNA, 23 nt, artificial
  Oligomer
aggcagggaacaucaccauccaa

SEQ ID NO: 16661 - RNA, 23 nt, artificial
  Oligomer
ucagcagagaacuggaaagacau

SEQ ID NO: 16662 - RNA, 23 nt, artificial
  Oligomer
aucagcagagaacuggaaagaca

SEQ ID NO: 16663 - RNA, 23 nt, artificial
  Oligomer
agucaaggaggaaagggauaguc

SEQ ID NO: 16664 - RNA, 23 nt, artificial
  Oligomer
uagucaaggaggaaagggauagu

SEQ ID NO: 16665 - RNA, 23 nt, artificial
  Oligomer
guagucaaggaggaaagggauag

SEQ ID NO: 16666 - RNA, 23 nt, artificial
  Oligomer
aguagucaaggaggaaagggaua

SEQ ID NO: 16667 - RNA, 23 nt, artificial
  Oligomer
caguagucaaggaggaaagggau

SEQ ID NO: 16668 - RNA, 23 nt, artificial
  Oligomer
guuugacuguggccuguuaacug

SEQ ID NO: 16669 - RNA, 23 nt, artificial
  Oligomer
aguuugacuguggccuguuaacu

SEQ ID NO: 16670 - RNA, 23 nt, artificial
  Oligomer
caguuugacuguggccuguuaac

SEQ ID NO: 16671 - RNA, 23 nt, artificial
  Oligomer
ucaguuugacuguggccuguuaa

SEQ ID NO: 16672 - RNA, 23 nt, artificial
  Oligomer
aucaguuugacuguggccuguua

SEQ ID NO: 16673 - RNA, 23 nt, artificial
  Oligomer
ccucagauggacaagauuacccc

SEQ ID NO: 16674 - RNA, 23 nt, artificial
  Oligomer
uccucagauggacaagauuaccc

SEQ ID NO: 16675 - RNA, 23 nt, artificial
  Oligomer
uuccucagauggacaagauuacc

SEQ ID NO: 16676 - RNA, 23 nt, artificial
  Oligomer
cuuccucagauggacaagauuac

SEQ ID NO: 16677 - RNA, 23 nt, artificial
  Oligomer
acuuccucagauggacaagauua

SEQ ID NO: 16678 - RNA, 23 nt, artificial
  Oligomer
accuucaacuggaauacaaccaa

SEQ ID NO: 16679 - RNA, 23 nt, artificial
  Oligomer
gaccuucaacuggaauacaacca

SEQ ID NO: 16680 - RNA, 23 nt, artificial
  Oligomer
agaccuucaacuggaauacaacc

SEQ ID NO: 16681 - RNA, 23 nt, artificial
  Oligomer
cagaccuucaacuggaauacaac

SEQ ID NO: 16682 - RNA, 23 nt, artificial
  Oligomer
ucagaccuucaacuggaauacaa

SEQ ID NO: 16683 - RNA, 23 nt, artificial
  Oligomer
gcacaaacucgcaucuacuggca

SEQ ID NO: 16684 - RNA, 23 nt, artificial
  Oligomer
ggcacaaacucgcaucuacuggc

SEQ ID NO: 16685 - RNA, 23 nt, artificial
  Oligomer
uggcacaaacucgcaucuacugg

SEQ ID NO: 16686 - RNA, 23 nt, artificial
  Oligomer
cuggcacaaacucgcaucuacug

SEQ ID NO: 16687 - RNA, 23 nt, artificial
  Oligomer
gcuggcacaaacucgcaucuacu

SEQ ID NO: 16688 - RNA, 23 nt, artificial
  Oligomer
guugaagagcuggcacaaacucg

SEQ ID NO: 16689 - RNA, 23 nt, artificial
  Oligomer
gaggcagggaacaucaccaucca

SEQ ID NO: 16690 - RNA, 23 nt, artificial
  Oligomer
acuaagggaagaaacaaaguuga

SEQ ID NO: 16691 - RNA, 23 nt, artificial
  Oligomer
cacuaugcugcuucacaaaccuu

SEQ ID NO: 16692 - RNA, 23 nt, artificial
  Oligomer
ucacuaugcugcuucacaaaccu

SEQ ID NO: 16693 - RNA, 23 nt, artificial
  Oligomer
cucacuaugcugcuucacaaacc

SEQ ID NO: 16694 - RNA, 23 nt, artificial
  Oligomer
ccucacuaugcugcuucacaaac

SEQ ID NO: 16695 - RNA, 23 nt, artificial
  Oligomer
accucacuaugcugcuucacaaa

SEQ ID NO: 16696 - RNA, 23 nt, artificial
  Oligomer
acaauucacuagaccagaagugg

SEQ ID NO: 16697 - RNA, 23 nt, artificial
  Oligomer
cacaauucacuagaccagaagug

SEQ ID NO: 16698 - RNA, 23 nt, artificial
  Oligomer
ccacaauucacuagaccagaagu

SEQ ID NO: 16699 - RNA, 23 nt, artificial
  Oligomer
uccacaauucacuagaccagaag

SEQ ID NO: 16700 - RNA, 23 nt, artificial
  Oligomer
uuccacaauucacuagaccagaa

SEQ ID NO: 16701 - RNA, 23 nt, artificial
  Oligomer
caguaagcuaucuucaaaugucu

SEQ ID NO: 16702 - RNA, 23 nt, artificial
  Oligomer
cguuguuuacaguguauguacua

SEQ ID NO: 16703 - RNA, 23 nt, artificial
  Oligomer
ucguuguuuacaguguauguacu

SEQ ID NO: 16704 - RNA, 23 nt, artificial
  Oligomer
aucguuguuuacaguguauguac

SEQ ID NO: 16705 - RNA, 23 nt, artificial
  Oligomer
cucuauugcugcucucucacucc

SEQ ID NO: 16706 - RNA, 23 nt, artificial
  Oligomer
ucucuauugcugcucucucacuc

SEQ ID NO: 16707 - RNA, 23 nt, artificial
  Oligomer
uucucuauugcugcucucucacu

SEQ ID NO: 16708 - RNA, 23 nt, artificial
  Oligomer
guucucuauugcugcucucucac

SEQ ID NO: 16709 - RNA, 23 nt, artificial
  Oligomer
uguucucuauugcugcucucuca

SEQ ID NO: 16710 - RNA, 23 nt, artificial
  Oligomer
cugugaaacuaaauccacaaccu

SEQ ID NO: 16711 - RNA, 23 nt, artificial
  Oligomer
gcugugaaacuaaauccacaacc

SEQ ID NO: 16712 - RNA, 23 nt, artificial
  Oligomer
agcugugaaacuaaauccacaac

SEQ ID NO: 16713 - RNA, 23 nt, artificial
  Oligomer
aagcugugaaacuaaauccacaa

SEQ ID NO: 16714 - RNA, 23 nt, artificial
  Oligomer
caagcugugaaacuaaauccaca

SEQ ID NO: 16715 - RNA, 23 nt, artificial
  Oligomer
ugauaugcugccugaccuacugc

SEQ ID NO: 16716 - RNA, 23 nt, artificial
  Oligomer
gugauaugcugccugaccuacug

SEQ ID NO: 16717 - RNA, 23 nt, artificial
  Oligomer
ugugauaugcugccugaccuacu

SEQ ID NO: 16718 - RNA, 23 nt, artificial
  Oligomer
uugugauaugcugccugaccuac

SEQ ID NO: 16719 - RNA, 23 nt, artificial
  Oligomer
uuugugauaugcugccugaccua

SEQ ID NO: 16720 - RNA, 23 nt, artificial
  Oligomer
caagagcauuuuccugauaaccu

SEQ ID NO: 16721 - RNA, 23 nt, artificial
  Oligomer
gcaagagcauuuuccugauaacc

SEQ ID NO: 16722 - RNA, 23 nt, artificial
  Oligomer
agcaagagcauuuuccugauaac

SEQ ID NO: 16723 - RNA, 23 nt, artificial
  Oligomer
cagcaaacuggauuucaauauga

SEQ ID NO: 16724 - RNA, 23 nt, artificial
  Oligomer
gaaacaaaguugaaccguuucuu

SEQ ID NO: 16725 - RNA, 23 nt, artificial
  Oligomer
agaaacaaaguugaaccguuucu

SEQ ID NO: 16726 - RNA, 23 nt, artificial
  Oligomer
aagaaacaaaguugaaccguuuc

SEQ ID NO: 16727 - RNA, 23 nt, artificial
  Oligomer
gaagaaacaaaguugaaccguuu

SEQ ID NO: 16728 - RNA, 23 nt, artificial
  Oligomer
ggaagaaacaaaguugaaccguu

SEQ ID NO: 16729 - RNA, 23 nt, artificial
  Oligomer
uaccucacuaugcugcuucacaa

SEQ ID NO: 16730 - RNA, 23 nt, artificial
  Oligomer
gggauuuaaagccuuuagagcca

SEQ ID NO: 16731 - RNA, 23 nt, artificial
  Oligomer
ugggauuuaaagccuuuagagcc

SEQ ID NO: 16732 - RNA, 23 nt, artificial
  Oligomer
cugggauuuaaagccuuuagagc

SEQ ID NO: 16733 - RNA, 23 nt, artificial
  Oligomer
gcugggauuuaaagccuuuagag

SEQ ID NO: 16734 - RNA, 23 nt, artificial
  Oligomer
ggcugggauuuaaagccuuuaga

SEQ ID NO: 16735 - RNA, 23 nt, artificial
  Oligomer
agaccagaaguggacgcaacuua

SEQ ID NO: 16736 - RNA, 23 nt, artificial
  Oligomer
guucauauuggacugauaaucuc

SEQ ID NO: 16737 - RNA, 23 nt, artificial
  Oligomer
caauguaaugcauaggaaguaug

SEQ ID NO: 16738 - RNA, 23 nt, artificial
  Oligomer
cuguuaacugguauauacauaua

SEQ ID NO: 16739 - RNA, 23 nt, artificial
  Oligomer
ccuguuaacugguauauacauau

SEQ ID NO: 16740 - RNA, 23 nt, artificial
  Oligomer
gccuguuaacugguauauacaua

SEQ ID NO: 16741 - RNA, 23 nt, artificial
  Oligomer
ggccuguuaacugguauauacau

SEQ ID NO: 16742 - RNA, 23 nt, artificial
  Oligomer
uggccuguuaacugguauauaca

SEQ ID NO: 16743 - RNA, 23 nt, artificial
  Oligomer
ggaaugagagauugagaagggaa

SEQ ID NO: 16744 - RNA, 23 nt, artificial
  Oligomer
ggcugaagugacguuaucaguca

SEQ ID NO: 16745 - RNA, 23 nt, artificial
  Oligomer
uggcugaagugacguuaucaguc

SEQ ID NO: 16746 - RNA, 23 nt, artificial
  Oligomer
cuggcugaagugacguuaucagu

SEQ ID NO: 16747 - RNA, 23 nt, artificial
  Oligomer
ccuggcugaagugacguuaucag

SEQ ID NO: 16748 - RNA, 23 nt, artificial
  Oligomer
accuggcugaagugacguuauca

SEQ ID NO: 16749 - RNA, 23 nt, artificial
  Oligomer
aggucuaacaccaacauaaggua

SEQ ID NO: 16750 - RNA, 23 nt, artificial
  Oligomer
gaggucuaacaccaacauaaggu

SEQ ID NO: 16751 - RNA, 23 nt, artificial
  Oligomer
agaggucuaacaccaacauaagg

SEQ ID NO: 16752 - RNA, 23 nt, artificial
  Oligomer
gagaggucuaacaccaacauaag

SEQ ID NO: 16753 - RNA, 23 nt, artificial
  Oligomer
agagaggucuaacaccaacauaa

SEQ ID NO: 16754 - RNA, 23 nt, artificial
  Oligomer
gcaaaagaagacaacauuucuca

SEQ ID NO: 16755 - RNA, 23 nt, artificial
  Oligomer
agcaaaagaagacaacauuucuc

SEQ ID NO: 16756 - RNA, 23 nt, artificial
  Oligomer
cagcaaaagaagacaacauuucu

SEQ ID NO: 16757 - RNA, 23 nt, artificial
  Oligomer
acagcaaaagaagacaacauuuc

SEQ ID NO: 16758 - RNA, 23 nt, artificial
  Oligomer
aacagcaaaagaagacaacauuu

SEQ ID NO: 16759 - RNA, 23 nt, artificial
  Oligomer
uuacucaugacuccuuucucuaa

SEQ ID NO: 16760 - RNA, 23 nt, artificial
  Oligomer
aaugauuuagguacgucaaagca

SEQ ID NO: 16761 - RNA, 23 nt, artificial
  Oligomer
acagcagaaaggagaacuaucca

SEQ ID NO: 16762 - RNA, 23 nt, artificial
  Oligomer
uacagcagaaaggagaacuaucc

SEQ ID NO: 16763 - RNA, 23 nt, artificial
  Oligomer
guacagcagaaaggagaacuauc

SEQ ID NO: 16764 - RNA, 23 nt, artificial
  Oligomer
gcaugaacaucuuuaggagacua

SEQ ID NO: 16765 - RNA, 23 nt, artificial
  Oligomer
ggcaugaacaucuuuaggagacu

SEQ ID NO: 16766 - RNA, 23 nt, artificial
  Oligomer
uggcaugaacaucuuuaggagac

SEQ ID NO: 16767 - RNA, 23 nt, artificial
  Oligomer
auggcaugaacaucuuuaggaga

SEQ ID NO: 16768 - RNA, 23 nt, artificial
  Oligomer
uauggcaugaacaucuuuaggag

SEQ ID NO: 16769 - RNA, 23 nt, artificial
  Oligomer
agaaggaggaaugagagauugag

SEQ ID NO: 16770 - RNA, 23 nt, artificial
  Oligomer
acuggauuucaauaugacaacca

SEQ ID NO: 16771 - RNA, 23 nt, artificial
  Oligomer
aacuggauuucaauaugacaacc

SEQ ID NO: 16772 - RNA, 23 nt, artificial
  Oligomer
aaacuggauuucaauaugacaac

SEQ ID NO: 16773 - RNA, 23 nt, artificial
  Oligomer
caaacuggauuucaauaugacaa

SEQ ID NO: 16774 - RNA, 23 nt, artificial
  Oligomer
gcaaacuggauuucaauaugaca

SEQ ID NO: 16775 - RNA, 23 nt, artificial
  Oligomer
gagaagaauuaaaugccaucaac

SEQ ID NO: 16776 - RNA, 23 nt, artificial
  Oligomer
caccucuccugguuggaaaaugg

SEQ ID NO: 16777 - RNA, 23 nt, artificial
  Oligomer
ucaccucuccugguuggaaaaug

SEQ ID NO: 16778 - RNA, 23 nt, artificial
  Oligomer
cucaccucuccugguuggaaaau

SEQ ID NO: 16779 - RNA, 23 nt, artificial
  Oligomer
ccucaccucuccugguuggaaaa

SEQ ID NO: 16780 - RNA, 23 nt, artificial
  Oligomer
gccucaccucuccugguuggaaa

SEQ ID NO: 16781 - RNA, 23 nt, artificial
  Oligomer
guuguucugaaguaugaaaaaga

SEQ ID NO: 16782 - RNA, 23 nt, artificial
  Oligomer
gguccaaauuguuggcuuucacu

SEQ ID NO: 16783 - RNA, 23 nt, artificial
  Oligomer
ggguccaaauuguuggcuuucac

SEQ ID NO: 16784 - RNA, 23 nt, artificial
  Oligomer
uggguccaaauuguuggcuuuca

SEQ ID NO: 16785 - RNA, 23 nt, artificial
  Oligomer
uuggguccaaauuguuggcuuuc

SEQ ID NO: 16786 - RNA, 23 nt, artificial
  Oligomer
cuuggguccaaauuguuggcuuu

SEQ ID NO: 16787 - RNA, 23 nt, artificial
  Oligomer
gaagacaacauuucucaaaugca

SEQ ID NO: 16788 - RNA, 23 nt, artificial
  Oligomer
agaagacaacauuucucaaaugc

SEQ ID NO: 16789 - RNA, 23 nt, artificial
  Oligomer
aagaagacaacauuucucaaaug

SEQ ID NO: 16790 - RNA, 23 nt, artificial
  Oligomer
aaagaagacaacauuucucaaau

SEQ ID NO: 16791 - RNA, 23 nt, artificial
  Oligomer
aaaagaagacaacauuucucaaa

SEQ ID NO: 16792 - RNA, 23 nt, artificial
  Oligomer
gggauaaucacauuaucaucuga

SEQ ID NO: 16793 - RNA, 23 nt, artificial
  Oligomer
ugggauaaucacauuaucaucug

SEQ ID NO: 16794 - RNA, 23 nt, artificial
  Oligomer
cugggauaaucacauuaucaucu

SEQ ID NO: 16795 - RNA, 23 nt, artificial
  Oligomer
gcugggauaaucacauuaucauc

SEQ ID NO: 16796 - RNA, 23 nt, artificial
  Oligomer
agcugggauaaucacauuaucau

SEQ ID NO: 16797 - RNA, 23 nt, artificial
  Oligomer
caucagcagagaacuggaaagac

SEQ ID NO: 16798 - RNA, 23 nt, artificial
  Oligomer
acaucagcagagaacuggaaaga

SEQ ID NO: 16799 - RNA, 23 nt, artificial
  Oligomer
gacaucagcagagaacuggaaag

SEQ ID NO: 16800 - RNA, 23 nt, artificial
  Oligomer
ugacaucagcagagaacuggaaa

SEQ ID NO: 16801 - RNA, 23 nt, artificial
  Oligomer
cugacaucagcagagaacuggaa

SEQ ID NO: 16802 - RNA, 23 nt, artificial
  Oligomer
ucugacaucagcagagaacugga

SEQ ID NO: 16803 - RNA, 23 nt, artificial
  Oligomer
cuaagguaguaacuuuccauagg

SEQ ID NO: 16804 - RNA, 23 nt, artificial
  Oligomer
ucuaagguaguaacuuuccauag

SEQ ID NO: 16805 - RNA, 23 nt, artificial
  Oligomer
gucuaagguaguaacuuuccaua

SEQ ID NO: 16806 - RNA, 23 nt, artificial
  Oligomer
ugucuaagguaguaacuuuccau

SEQ ID NO: 16807 - RNA, 23 nt, artificial
  Oligomer
augucuaagguaguaacuuucca

SEQ ID NO: 16808 - RNA, 23 nt, artificial
  Oligomer
guauaacaguguccgcagaagca

SEQ ID NO: 16809 - RNA, 23 nt, artificial
  Oligomer
uguauaacaguguccgcagaagc

SEQ ID NO: 16810 - RNA, 23 nt, artificial
  Oligomer
cuguauaacaguguccgcagaag

SEQ ID NO: 16811 - RNA, 23 nt, artificial
  Oligomer
ccuguauaacaguguccgcagaa

SEQ ID NO: 16812 - RNA, 23 nt, artificial
  Oligomer
cccuguauaacaguguccgcaga

SEQ ID NO: 16813 - RNA, 23 nt, artificial
  Oligomer
ccauuaccuuaaucucaguaaau

SEQ ID NO: 16814 - RNA, 23 nt, artificial
  Oligomer
gccauuaccuuaaucucaguaaa

SEQ ID NO: 16815 - RNA, 23 nt, artificial
  Oligomer
ggccauuaccuuaaucucaguaa

SEQ ID NO: 16816 - RNA, 23 nt, artificial
  Oligomer
gggccauuaccuuaaucucagua

SEQ ID NO: 16817 - RNA, 23 nt, artificial
  Oligomer
ugggccauuaccuuaaucucagu

SEQ ID NO: 16818 - RNA, 23 nt, artificial
  Oligomer
ccuucaacuggaauacaaccaag

SEQ ID NO: 16819 - RNA, 23 nt, artificial
  Oligomer
gacuguaagaagagaacaucuca

SEQ ID NO: 16820 - RNA, 23 nt, artificial
  Oligomer
agacuguaagaagagaacaucuc

SEQ ID NO: 16821 - RNA, 23 nt, artificial
  Oligomer
uagacuguaagaagagaacaucu

SEQ ID NO: 16822 - RNA, 23 nt, artificial
  Oligomer
auagacuguaagaagagaacauc

SEQ ID NO: 16823 - RNA, 23 nt, artificial
  Oligomer
uauagacuguaagaagagaacau

SEQ ID NO: 16824 - RNA, 23 nt, artificial
  Oligomer
gcuuuauagacuguaagaagaga

SEQ ID NO: 16825 - RNA, 23 nt, artificial
  Oligomer
ugcuuuauagacuguaagaagag

SEQ ID NO: 16826 - RNA, 23 nt, artificial
  Oligomer
uugcuuuauagacuguaagaaga

SEQ ID NO: 16827 - RNA, 23 nt, artificial
  Oligomer
auugcuuuauagacuguaagaag

SEQ ID NO: 16828 - RNA, 23 nt, artificial
  Oligomer
cauugcuuuauagacuguaagaa

SEQ ID NO: 16829 - RNA, 23 nt, artificial
  Oligomer
agaaggauaauuugcucaaccuc

SEQ ID NO: 16830 - RNA, 23 nt, artificial
  Oligomer
uagaaggauaauuugcucaaccu

SEQ ID NO: 16831 - RNA, 23 nt, artificial
  Oligomer
uuagaaggauaauuugcucaacc

SEQ ID NO: 16832 - RNA, 23 nt, artificial
  Oligomer
auuagaaggauaauuugcucaac

SEQ ID NO: 16833 - RNA, 23 nt, artificial
  Oligomer
uauuagaaggauaauuugcucaa

SEQ ID NO: 16834 - RNA, 23 nt, artificial
  Oligomer
aucuacuggcaaaaggagaagaa

SEQ ID NO: 16835 - RNA, 23 nt, artificial
  Oligomer
caguugugaugacuauguuucua

SEQ ID NO: 16836 - RNA, 23 nt, artificial
  Oligomer
acaguugugaugacuauguuucu

SEQ ID NO: 16837 - RNA, 23 nt, artificial
  Oligomer
aacaguugugaugacuauguuuc

SEQ ID NO: 16838 - RNA, 23 nt, artificial
  Oligomer
uaacaguugugaugacuauguuu

SEQ ID NO: 16839 - RNA, 23 nt, artificial
  Oligomer
guaacaguugugaugacuauguu

SEQ ID NO: 16840 - RNA, 23 nt, artificial
  Oligomer
uggcugggauuuaaagccuuuag

SEQ ID NO: 16841 - RNA, 23 nt, artificial
  Oligomer
auggcugggauuuaaagccuuua

SEQ ID NO: 16842 - RNA, 23 nt, artificial
  Oligomer
cauggcugggauuuaaagccuuu

SEQ ID NO: 16843 - RNA, 23 nt, artificial
  Oligomer
aaaaucuggaguugaacagcaaa

SEQ ID NO: 16844 - RNA, 23 nt, artificial
  Oligomer
gaaaaucuggaguugaacagcaa

SEQ ID NO: 16845 - RNA, 23 nt, artificial
  Oligomer
gcuaucuucaaaugucuaaggua

SEQ ID NO: 16846 - RNA, 23 nt, artificial
  Oligomer
agcuaucuucaaaugucuaaggu

SEQ ID NO: 16847 - RNA, 23 nt, artificial
  Oligomer
aagcuaucuucaaaugucuaagg

SEQ ID NO: 16848 - RNA, 23 nt, artificial
  Oligomer
uaagcuaucuucaaaugucuaag

SEQ ID NO: 16849 - RNA, 23 nt, artificial
  Oligomer
guaagcuaucuucaaaugucuaa

SEQ ID NO: 16850 - RNA, 23 nt, artificial
  Oligomer
ggaaagggauaguccaaagacuu

SEQ ID NO: 16851 - RNA, 23 nt, artificial
  Oligomer
aggaaagggauaguccaaagacu

SEQ ID NO: 16852 - RNA, 23 nt, artificial
  Oligomer
aagaugcagagagagaaggagga

SEQ ID NO: 16853 - RNA, 23 nt, artificial
  Oligomer
caagaugcagagagagaaggagg

SEQ ID NO: 16854 - RNA, 23 nt, artificial
  Oligomer
agaagagaacaucucagaagugg

SEQ ID NO: 16855 - RNA, 23 nt, artificial
  Oligomer
aagaagagaacaucucagaagug

SEQ ID NO: 16856 - RNA, 23 nt, artificial
  Oligomer
uaagaagagaacaucucagaagu

SEQ ID NO: 16857 - RNA, 23 nt, artificial
  Oligomer
guaagaagagaacaucucagaag

SEQ ID NO: 16858 - RNA, 23 nt, artificial
  Oligomer
uguaagaagagaacaucucagaa

SEQ ID NO: 16859 - RNA, 23 nt, artificial
  Oligomer
ccugauaaccugcucccauccug

SEQ ID NO: 16860 - RNA, 23 nt, artificial
  Oligomer
uccugauaaccugcucccauccu

SEQ ID NO: 16861 - RNA, 23 nt, artificial
  Oligomer
uuccugauaaccugcucccaucc

SEQ ID NO: 16862 - RNA, 23 nt, artificial
  Oligomer
uuuccugauaaccugcucccauc

SEQ ID NO: 16863 - RNA, 23 nt, artificial
  Oligomer
uuuuccugauaaccugcucccau

SEQ ID NO: 16864 - RNA, 23 nt, artificial
  Oligomer
caacacaacaguuucccaagauc

SEQ ID NO: 16865 - RNA, 23 nt, artificial
  Oligomer
ucaacacaacaguuucccaagau

SEQ ID NO: 16866 - RNA, 23 nt, artificial
  Oligomer
aucaacacaacaguuucccaaga

SEQ ID NO: 16867 - RNA, 23 nt, artificial
  Oligomer
caucaacacaacaguuucccaag

SEQ ID NO: 16868 - RNA, 23 nt, artificial
  Oligomer
ccaucaacacaacaguuucccaa

SEQ ID NO: 16869 - RNA, 23 nt, artificial
  Oligomer
cuaguauaucugacuuugaaauu

SEQ ID NO: 16870 - RNA, 23 nt, artificial
  Oligomer
ccuaguauaucugacuuugaaau

SEQ ID NO: 16871 - RNA, 23 nt, artificial
  Oligomer
accuaguauaucugacuuugaaa

SEQ ID NO: 16872 - RNA, 23 nt, artificial
  Oligomer
caccuaguauaucugacuuugaa

SEQ ID NO: 16873 - RNA, 23 nt, artificial
  Oligomer
acaccuaguauaucugacuuuga

SEQ ID NO: 16874 - RNA, 23 nt, artificial
  Oligomer
cgaguguguuguucugaaguaug

SEQ ID NO: 16875 - RNA, 23 nt, artificial
  Oligomer
ccggaccaucuuugauaucacua

SEQ ID NO: 16876 - RNA, 23 nt, artificial
  Oligomer
accggaccaucuuugauaucacu

SEQ ID NO: 16877 - RNA, 23 nt, artificial
  Oligomer
aaccggaccaucuuugauaucac

SEQ ID NO: 16878 - RNA, 23 nt, artificial
  Oligomer
ggaaaugucgccucucugaagau

SEQ ID NO: 16879 - RNA, 23 nt, artificial
  Oligomer
gggaaaugucgccucucugaaga

SEQ ID NO: 16880 - RNA, 23 nt, artificial
  Oligomer
ggggaaaugucgccucucugaag

SEQ ID NO: 16881 - RNA, 23 nt, artificial
  Oligomer
aggggaaaugucgccucucugaa

SEQ ID NO: 16882 - RNA, 23 nt, artificial
  Oligomer
aaggggaaaugucgccucucuga

SEQ ID NO: 16883 - RNA, 23 nt, artificial
  Oligomer
ggaacaucaccauccaagugucc

SEQ ID NO: 16884 - RNA, 23 nt, artificial
  Oligomer
gggaacaucaccauccaaguguc

SEQ ID NO: 16885 - RNA, 23 nt, artificial
  Oligomer
cuggagggucuucuacgugagca

SEQ ID NO: 16886 - RNA, 23 nt, artificial
  Oligomer
acuggagggucuucuacgugagc

SEQ ID NO: 16887 - RNA, 23 nt, artificial
  Oligomer
cacuggagggucuucuacgugag

SEQ ID NO: 16888 - RNA, 23 nt, artificial
  Oligomer
ucacuggagggucuucuacguga

SEQ ID NO: 16889 - RNA, 23 nt, artificial
  Oligomer
uagggcagagaggucuaacacca

SEQ ID NO: 16890 - RNA, 23 nt, artificial
  Oligomer
guagggcagagaggucuaacacc

SEQ ID NO: 16891 - RNA, 23 nt, artificial
  Oligomer
uguagggcagagaggucuaacac

SEQ ID NO: 16892 - RNA, 23 nt, artificial
  Oligomer
guguagggcagagaggucuaaca

SEQ ID NO: 16893 - RNA, 23 nt, artificial
  Oligomer
ggcuuuagcuaccucacuaugcu

SEQ ID NO: 16894 - RNA, 23 nt, artificial
  Oligomer
uggcuuuagcuaccucacuaugc

SEQ ID NO: 16895 - RNA, 23 nt, artificial
  Oligomer
auggcuuuagcuaccucacuaug

SEQ ID NO: 16896 - RNA, 23 nt, artificial
  Oligomer
cauggcuuuagcuaccucacuau

SEQ ID NO: 16897 - RNA, 23 nt, artificial
  Oligomer
ccauggcuuuagcuaccucacua

SEQ ID NO: 16898 - RNA, 23 nt, artificial
  Oligomer
caaaagaagacaacauuucucaa

SEQ ID NO: 16899 - RNA, 23 nt, artificial
  Oligomer
aucucuguguguuuuguaaacau

SEQ ID NO: 16900 - RNA, 23 nt, artificial
  Oligomer
aaucucuguguguuuuguaaaca

SEQ ID NO: 16901 - RNA, 23 nt, artificial
  Oligomer
caaucucuguguguuuuguaaac

SEQ ID NO: 16902 - RNA, 23 nt, artificial
  Oligomer
ccaaucucuguguguuuuguaaa

SEQ ID NO: 16903 - RNA, 23 nt, artificial
  Oligomer
uccaaucucuguguguuuuguaa

SEQ ID NO: 16904 - RNA, 23 nt, artificial
  Oligomer
augacuccuuucucuaaaacugc

SEQ ID NO: 16905 - RNA, 23 nt, artificial
  Oligomer
ccuuuggagacccaggaacaccc

SEQ ID NO: 16906 - RNA, 23 nt, artificial
  Oligomer
accuuuggagacccaggaacacc

SEQ ID NO: 16907 - RNA, 23 nt, artificial
  Oligomer
aaccuuuggagacccaggaacac

SEQ ID NO: 16908 - RNA, 23 nt, artificial
  Oligomer
caaccuuuggagacccaggaaca

SEQ ID NO: 16909 - RNA, 23 nt, artificial
  Oligomer
ucaaagcaguagucaaggaggaa

SEQ ID NO: 16910 - RNA, 23 nt, artificial
  Oligomer
cauguaagacgaaugauuuaggu

SEQ ID NO: 16911 - RNA, 23 nt, artificial
  Oligomer
acauguaagacgaaugauuuagg

SEQ ID NO: 16912 - RNA, 23 nt, artificial
  Oligomer
gacauguaagacgaaugauuuag

SEQ ID NO: 16913 - RNA, 23 nt, artificial
  Oligomer
ugacauguaagacgaaugauuua

SEQ ID NO: 16914 - RNA, 23 nt, artificial
  Oligomer
cugacauguaagacgaaugauuu

SEQ ID NO: 16915 - RNA, 23 nt, artificial
  Oligomer
cuuuaggagacuaauggaaauau

SEQ ID NO: 16916 - RNA, 23 nt, artificial
  Oligomer
ucuuuaggagacuaauggaaaua

SEQ ID NO: 16917 - RNA, 23 nt, artificial
  Oligomer
aucuuuaggagacuaauggaaau

SEQ ID NO: 16918 - RNA, 23 nt, artificial
  Oligomer
gcaagcugugaaacuaaauccac

SEQ ID NO: 16919 - RNA, 23 nt, artificial
  Oligomer
aggucaacuucagagacuaucug

SEQ ID NO: 16920 - RNA, 23 nt, artificial
  Oligomer
caggucaacuucagagacuaucu

SEQ ID NO: 16921 - RNA, 23 nt, artificial
  Oligomer
acaggucaacuucagagacuauc

SEQ ID NO: 16922 - RNA, 23 nt, artificial
  Oligomer
aacaggucaacuucagagacuau

SEQ ID NO: 16923 - RNA, 23 nt, artificial
  Oligomer
uaacaggucaacuucagagacua

SEQ ID NO: 16924 - RNA, 23 nt, artificial
  Oligomer
agagaauaccaguguuauuaaug

SEQ ID NO: 16925 - RNA, 23 nt, artificial
  Oligomer
uagagaauaccaguguuauuaau

SEQ ID NO: 16926 - RNA, 23 nt, artificial
  Oligomer
uuagagaauaccaguguuauuaa

SEQ ID NO: 16927 - RNA, 23 nt, artificial
  Oligomer
uuuagagaauaccaguguuauua

SEQ ID NO: 16928 - RNA, 23 nt, artificial
  Oligomer
cuuuagagaauaccaguguuauu

SEQ ID NO: 16929 - RNA, 23 nt, artificial
  Oligomer
guucuggaagggacuuuagagaa

SEQ ID NO: 16930 - RNA, 23 nt, artificial
  Oligomer
gaauucuugaguucuggaaggga

SEQ ID NO: 16931 - RNA, 23 nt, artificial
  Oligomer
agaauucuugaguucuggaaggg

SEQ ID NO: 16932 - RNA, 23 nt, artificial
  Oligomer
cagaauucuugaguucuggaagg

SEQ ID NO: 16933 - RNA, 23 nt, artificial
  Oligomer
gcagaauucuugaguucuggaag

SEQ ID NO: 16934 - RNA, 23 nt, artificial
  Oligomer
ugcagaauucuugaguucuggaa

SEQ ID NO: 16935 - RNA, 23 nt, artificial
  Oligomer
cucuggugaccuugaucaaggug

SEQ ID NO: 16936 - RNA, 23 nt, artificial
  Oligomer
gcucuggugaccuugaucaaggu

SEQ ID NO: 16937 - RNA, 23 nt, artificial
  Oligomer
agcucuggugaccuugaucaagg

SEQ ID NO: 16938 - RNA, 23 nt, artificial
  Oligomer
uagcucuggugaccuugaucaag

SEQ ID NO: 16939 - RNA, 23 nt, artificial
  Oligomer
guagcucuggugaccuugaucaa

SEQ ID NO: 16940 - RNA, 23 nt, artificial
  Oligomer
cuggauuucaauaugacaaccaa

SEQ ID NO: 16941 - RNA, 23 nt, artificial
  Oligomer
cagauacuuugucagcaauacua

SEQ ID NO: 16942 - RNA, 23 nt, artificial
  Oligomer
cuaccucacuaugcugcuucaca

SEQ ID NO: 16943 - RNA, 23 nt, artificial
  Oligomer
gcuaccucacuaugcugcuucac

SEQ ID NO: 16944 - RNA, 23 nt, artificial
  Oligomer
agcuaccucacuaugcugcuuca

SEQ ID NO: 16945 - RNA, 23 nt, artificial
  Oligomer
ugaaaaucuggaguugaacagca

SEQ ID NO: 16946 - RNA, 23 nt, artificial
  Oligomer
ggucuuucugacaucagcagaga

SEQ ID NO: 16947 - RNA, 23 nt, artificial
  Oligomer
gggucuuucugacaucagcagag

SEQ ID NO: 16948 - RNA, 23 nt, artificial
  Oligomer
ugggucuuucugacaucagcaga

SEQ ID NO: 16949 - RNA, 23 nt, artificial
  Oligomer
cugggucuuucugacaucagcag

SEQ ID NO: 16950 - RNA, 23 nt, artificial
  Oligomer
ucugggucuuucugacaucagca

SEQ ID NO: 16951 - RNA, 23 nt, artificial
  Oligomer
caguguauguacuaagcaguaag

SEQ ID NO: 16952 - RNA, 23 nt, artificial
  Oligomer
acaguguauguacuaagcaguaa

SEQ ID NO: 16953 - RNA, 23 nt, artificial
  Oligomer
uacaguguauguacuaagcagua

SEQ ID NO: 16954 - RNA, 23 nt, artificial
  Oligomer
uuacaguguauguacuaagcagu

SEQ ID NO: 16955 - RNA, 23 nt, artificial
  Oligomer
uuuacaguguauguacuaagcag

SEQ ID NO: 16956 - RNA, 23 nt, artificial
  Oligomer
cagcagaaaggagaacuauccaa

SEQ ID NO: 16957 - RNA, 23 nt, artificial
  Oligomer
guguuuacccaguauuccauuuu

SEQ ID NO: 16958 - RNA, 23 nt, artificial
  Oligomer
gguguuuacccaguauuccauuu

SEQ ID NO: 16959 - RNA, 23 nt, artificial
  Oligomer
ugguguuuacccaguauuccauu

SEQ ID NO: 16960 - RNA, 23 nt, artificial
  Oligomer
uugguguuuacccaguauuccau

SEQ ID NO: 16961 - RNA, 23 nt, artificial
  Oligomer
auugguguuuacccaguauucca

SEQ ID NO: 16962 - RNA, 23 nt, artificial
  Oligomer
gcauaggaaguauggcaugaaca

SEQ ID NO: 16963 - RNA, 23 nt, artificial
  Oligomer
gauuuuaugcugcuguuuacaaa

SEQ ID NO: 16964 - RNA, 23 nt, artificial
  Oligomer
agauuuuaugcugcuguuuacaa

SEQ ID NO: 16965 - RNA, 23 nt, artificial
  Oligomer
aagauuuuaugcugcuguuuaca

SEQ ID NO: 16966 - RNA, 23 nt, artificial
  Oligomer
gaagauuuuaugcugcuguuuac

SEQ ID NO: 16967 - RNA, 23 nt, artificial
  Oligomer
agaagauuuuaugcugcuguuua

SEQ ID NO: 16968 - RNA, 23 nt, artificial
  Oligomer
cuaaugucagaguagaagauuuu

SEQ ID NO: 16969 - RNA, 23 nt, artificial
  Oligomer
ccuaaugucagaguagaagauuu

SEQ ID NO: 16970 - RNA, 23 nt, artificial
  Oligomer
aggcaaagugcugcuggaaguag

SEQ ID NO: 16971 - RNA, 23 nt, artificial
  Oligomer
caggcaaagugcugcuggaagua

SEQ ID NO: 16972 - RNA, 23 nt, artificial
  Oligomer
aguucuggaagggacuuuagaga

SEQ ID NO: 16973 - RNA, 23 nt, artificial
  Oligomer
gaguucuggaagggacuuuagag

SEQ ID NO: 16974 - RNA, 23 nt, artificial
  Oligomer
ugaguucuggaagggacuuuaga

SEQ ID NO: 16975 - RNA, 23 nt, artificial
  Oligomer
uugaguucuggaagggacuuuag

SEQ ID NO: 16976 - RNA, 23 nt, artificial
  Oligomer
cuugaguucuggaagggacuuua

SEQ ID NO: 16977 - RNA, 23 nt, artificial
  Oligomer
caccuggcugaagugacguuauc

SEQ ID NO: 16978 - RNA, 23 nt, artificial
  Oligomer
acaccuggcugaagugacguuau

SEQ ID NO: 16979 - RNA, 23 nt, artificial
  Oligomer
agaaccggaccaucuuugauauc

SEQ ID NO: 16980 - RNA, 23 nt, artificial
  Oligomer
aagaaccggaccaucuuugauau

SEQ ID NO: 16981 - RNA, 23 nt, artificial
  Oligomer
caagaaccggaccaucuuugaua

SEQ ID NO: 16982 - RNA, 23 nt, artificial
  Oligomer
acaagaaccggaccaucuuugau

SEQ ID NO: 16983 - RNA, 23 nt, artificial
  Oligomer
uacaagaaccggaccaucuuuga

SEQ ID NO: 16984 - RNA, 23 nt, artificial
  Oligomer
ggagaagaaaauggugcugacua

SEQ ID NO: 16985 - RNA, 23 nt, artificial
  Oligomer
aggagaagaaaauggugcugacu

SEQ ID NO: 16986 - RNA, 23 nt, artificial
  Oligomer
aaggagaagaaaauggugcugac

SEQ ID NO: 16987 - RNA, 23 nt, artificial
  Oligomer
guguuauccacgugaccaaggaa

SEQ ID NO: 16988 - RNA, 23 nt, artificial
  Oligomer
gguguuauccacgugaccaagga

SEQ ID NO: 16989 - RNA, 23 nt, artificial
  Oligomer
agguguuauccacgugaccaagg

SEQ ID NO: 16990 - RNA, 23 nt, artificial
  Oligomer
cagguguuauccacgugaccaag

SEQ ID NO: 16991 - RNA, 23 nt, artificial
  Oligomer
ucagguguuauccacgugaccaa

SEQ ID NO: 16992 - RNA, 23 nt, artificial
  Oligomer
uguuggcuuucacuuuugacccu

SEQ ID NO: 16993 - RNA, 23 nt, artificial
  Oligomer
uuguuggcuuucacuuuugaccc

SEQ ID NO: 16994 - RNA, 23 nt, artificial
  Oligomer
auuguuggcuuucacuuuugacc

SEQ ID NO: 16995 - RNA, 23 nt, artificial
  Oligomer
aauuguuggcuuucacuuuugac

SEQ ID NO: 16996 - RNA, 23 nt, artificial
  Oligomer
aaauuguuggcuuucacuuuuga

SEQ ID NO: 16997 - RNA, 23 nt, artificial
  Oligomer
aguaacaguugugaugacuaugu

SEQ ID NO: 16998 - RNA, 23 nt, artificial
  Oligomer
uaguaacaguugugaugacuaug

SEQ ID NO: 16999 - RNA, 23 nt, artificial
  Oligomer
uuaguaacaguugugaugacuau

SEQ ID NO: 17000 - RNA, 23 nt, artificial
  Oligomer
uuuaguaacaguugugaugacua

SEQ ID NO: 17001 - RNA, 23 nt, artificial
  Oligomer
acuuaagcugggauaaucacauu

SEQ ID NO: 17002 - RNA, 23 nt, artificial
  Oligomer
aacuuaagcugggauaaucacau

SEQ ID NO: 17003 - RNA, 23 nt, artificial
  Oligomer
caacuuaagcugggauaaucaca

SEQ ID NO: 17004 - RNA, 23 nt, artificial
  Oligomer
gcaacuuaagcugggauaaucac

SEQ ID NO: 17005 - RNA, 23 nt, artificial
  Oligomer
cgcaacuuaagcugggauaauca

SEQ ID NO: 17006 - RNA, 23 nt, artificial
  Oligomer
cuuccacaauucacuagaccaga

SEQ ID NO: 17007 - RNA, 23 nt, artificial
  Oligomer
acuggaaagacauagccaacugc

SEQ ID NO: 17008 - RNA, 23 nt, artificial
  Oligomer
aacuggaaagacauagccaacug

SEQ ID NO: 17009 - RNA, 23 nt, artificial
  Oligomer
gaacuggaaagacauagccaacu

SEQ ID NO: 17010 - RNA, 23 nt, artificial
  Oligomer
agaacuggaaagacauagccaac

SEQ ID NO: 17011 - RNA, 23 nt, artificial
  Oligomer
gagaacuggaaagacauagccaa

SEQ ID NO: 17012 - RNA, 23 nt, artificial
  Oligomer
acuaagcaguaagcuaucuucaa

SEQ ID NO: 17013 - RNA, 23 nt, artificial
  Oligomer
cuauccaaaacuaauuuccucug

SEQ ID NO: 17014 - RNA, 23 nt, artificial
  Oligomer
acuauccaaaacuaauuuccucu

SEQ ID NO: 17015 - RNA, 23 nt, artificial
  Oligomer
aacuauccaaaacuaauuuccuc

SEQ ID NO: 17016 - RNA, 23 nt, artificial
  Oligomer
gaacuauccaaaacuaauuuccu

SEQ ID NO: 17017 - RNA, 23 nt, artificial
  Oligomer
agaacuauccaaaacuaauuucc

SEQ ID NO: 17018 - RNA, 23 nt, artificial
  Oligomer
caugagguacagcagaaaggaga

SEQ ID NO: 17019 - RNA, 23 nt, artificial
  Oligomer
ccaugagguacagcagaaaggag

SEQ ID NO: 17020 - RNA, 23 nt, artificial
  Oligomer
cccaugagguacagcagaaagga

SEQ ID NO: 17021 - RNA, 23 nt, artificial
  Oligomer
ccccaugagguacagcagaaagg

SEQ ID NO: 17022 - RNA, 23 nt, artificial
  Oligomer
cccccaugagguacagcagaaag

SEQ ID NO: 17023 - RNA, 23 nt, artificial
  Oligomer
ucccccaugagguacagcagaaa

SEQ ID NO: 17024 - RNA, 23 nt, artificial
  Oligomer
cccaguauuccauuuuuuucauu

SEQ ID NO: 17025 - RNA, 23 nt, artificial
  Oligomer
acccaguauuccauuuuuuucau

SEQ ID NO: 17026 - RNA, 23 nt, artificial
  Oligomer
uacccaguauuccauuuuuuuca

SEQ ID NO: 17027 - RNA, 23 nt, artificial
  Oligomer
uuacccaguauuccauuuuuuuc

SEQ ID NO: 17028 - RNA, 23 nt, artificial
  Oligomer
uuuacccaguauuccauuuuuuu

SEQ ID NO: 17029 - RNA, 23 nt, artificial
  Oligomer
caugaacaucuuuaggagacuaa

SEQ ID NO: 17030 - RNA, 23 nt, artificial
  Oligomer
aaaaguggaauuuuucuucagca

SEQ ID NO: 17031 - RNA, 23 nt, artificial
  Oligomer
ccagaacccagauuuccuaacuc

SEQ ID NO: 17032 - RNA, 23 nt, artificial
  Oligomer
gccagaacccagauuuccuaacu

SEQ ID NO: 17033 - RNA, 23 nt, artificial
  Oligomer
cgccagaacccagauuuccuaac

SEQ ID NO: 17034 - RNA, 23 nt, artificial
  Oligomer
gcgccagaacccagauuuccuaa

SEQ ID NO: 17035 - RNA, 23 nt, artificial
  Oligomer
agcgccagaacccagauuuccua

SEQ ID NO: 17036 - RNA, 23 nt, artificial
  Oligomer
cuagaggaauauggugggcacag

SEQ ID NO: 17037 - RNA, 23 nt, artificial
  Oligomer
ucuagaggaauauggugggcaca

SEQ ID NO: 17038 - RNA, 23 nt, artificial
  Oligomer
caauugaccucuucugggaacuu

SEQ ID NO: 17039 - RNA, 23 nt, artificial
  Oligomer
gcaauugaccucuucugggaacu

SEQ ID NO: 17040 - RNA, 23 nt, artificial
  Oligomer
ugcaauugaccucuucugggaac

SEQ ID NO: 17041 - RNA, 23 nt, artificial
  Oligomer
uugcaauugaccucuucugggaa

SEQ ID NO: 17042 - RNA, 23 nt, artificial
  Oligomer
uuugcaauugaccucuucuggga

SEQ ID NO: 17043 - RNA, 23 nt, artificial
  Oligomer
caugaauauauggcccgaguaca

SEQ ID NO: 17044 - RNA, 23 nt, artificial
  Oligomer
acaugaauauauggcccgaguac

SEQ ID NO: 17045 - RNA, 23 nt, artificial
  Oligomer
gacaugaauauauggcccgagua

SEQ ID NO: 17046 - RNA, 23 nt, artificial
  Oligomer
caucuacuggcaaaaggagaaga

SEQ ID NO: 17047 - RNA, 23 nt, artificial
  Oligomer
ggucuuucucacuucuguucagg

SEQ ID NO: 17048 - RNA, 23 nt, artificial
  Oligomer
uggucuuucucacuucuguucag

SEQ ID NO: 17049 - RNA, 23 nt, artificial
  Oligomer
cuggucuuucucacuucuguuca

SEQ ID NO: 17050 - RNA, 23 nt, artificial
  Oligomer
gcuggucuuucucacuucuguuc

SEQ ID NO: 17051 - RNA, 23 nt, artificial
  Oligomer
ggcuggucuuucucacuucuguu

SEQ ID NO: 17052 - RNA, 23 nt, artificial
  Oligomer
ccucuguaaaguaacagaaguua

SEQ ID NO: 17053 - RNA, 23 nt, artificial
  Oligomer
cccucuguaaaguaacagaaguu

SEQ ID NO: 17054 - RNA, 23 nt, artificial
  Oligomer
acccucuguaaaguaacagaagu

SEQ ID NO: 17055 - RNA, 23 nt, artificial
  Oligomer
aacccucuguaaaguaacagaag

SEQ ID NO: 17056 - RNA, 23 nt, artificial
  Oligomer
aaacccucuguaaaguaacagaa

SEQ ID NO: 17057 - RNA, 23 nt, artificial
  Oligomer
cuacgugagcaauuggauuguca

SEQ ID NO: 17058 - RNA, 23 nt, artificial
  Oligomer
ucuacgugagcaauuggauuguc

SEQ ID NO: 17059 - RNA, 23 nt, artificial
  Oligomer
uucuacgugagcaauuggauugu

SEQ ID NO: 17060 - RNA, 23 nt, artificial
  Oligomer
cuucuacgugagcaauuggauug

SEQ ID NO: 17061 - RNA, 23 nt, artificial
  Oligomer
ucuucuacgugagcaauuggauu

SEQ ID NO: 17062 - RNA, 23 nt, artificial
  Oligomer
aagcugggauaaucacauuauca

SEQ ID NO: 17063 - RNA, 23 nt, artificial
  Oligomer
uaagcugggauaaucacauuauc

SEQ ID NO: 17064 - RNA, 23 nt, artificial
  Oligomer
uuaagcugggauaaucacauuau

SEQ ID NO: 17065 - RNA, 23 nt, artificial
  Oligomer
acgcaacuuaagcugggauaauc

SEQ ID NO: 17066 - RNA, 23 nt, artificial
  Oligomer
gacgcaacuuaagcugggauaau

SEQ ID NO: 17067 - RNA, 23 nt, artificial
  Oligomer
ggacgcaacuuaagcugggauaa

SEQ ID NO: 17068 - RNA, 23 nt, artificial
  Oligomer
uggacgcaacuuaagcugggaua

SEQ ID NO: 17069 - RNA, 23 nt, artificial
  Oligomer
cuaaaacugccuuccacaauuca

SEQ ID NO: 17070 - RNA, 23 nt, artificial
  Oligomer
ucuaaaacugccuuccacaauuc

SEQ ID NO: 17071 - RNA, 23 nt, artificial
  Oligomer
cucuaaaacugccuuccacaauu

SEQ ID NO: 17072 - RNA, 23 nt, artificial
  Oligomer
ucucuaaaacugccuuccacaau

SEQ ID NO: 17073 - RNA, 23 nt, artificial
  Oligomer
uucucuaaaacugccuuccacaa

SEQ ID NO: 17074 - RNA, 23 nt, artificial
  Oligomer
cgucaaagcaguagucaaggagg

SEQ ID NO: 17075 - RNA, 23 nt, artificial
  Oligomer
augauuuagguacgucaaagcag

SEQ ID NO: 17076 - RNA, 23 nt, artificial
  Oligomer
uaugcugcuguuuacaaaagccc

SEQ ID NO: 17077 - RNA, 23 nt, artificial
  Oligomer
uuaugcugcuguuuacaaaagcc

SEQ ID NO: 17078 - RNA, 23 nt, artificial
  Oligomer
uuuaugcugcuguuuacaaaagc

SEQ ID NO: 17079 - RNA, 23 nt, artificial
  Oligomer
uuuuaugcugcuguuuacaaaag

SEQ ID NO: 17080 - RNA, 23 nt, artificial
  Oligomer
auuuuaugcugcuguuuacaaaa

SEQ ID NO: 17081 - RNA, 23 nt, artificial
  Oligomer
gucagaguagaagauuuuaugcu

SEQ ID NO: 17082 - RNA, 23 nt, artificial
  Oligomer
ugucagaguagaagauuuuaugc

SEQ ID NO: 17083 - RNA, 23 nt, artificial
  Oligomer
augucagaguagaagauuuuaug

SEQ ID NO: 17084 - RNA, 23 nt, artificial
  Oligomer
aaugucagaguagaagauuuuau

SEQ ID NO: 17085 - RNA, 23 nt, artificial
  Oligomer
uaaugucagaguagaagauuuua

SEQ ID NO: 17086 - RNA, 23 nt, artificial
  Oligomer
cccagggaggugacccgaauuau

SEQ ID NO: 17087 - RNA, 23 nt, artificial
  Oligomer
guguuuugaaaugcagaauucuu

SEQ ID NO: 17088 - RNA, 23 nt, artificial
  Oligomer
uauggugggcacagaaguagcuc

SEQ ID NO: 17089 - RNA, 23 nt, artificial
  Oligomer
auauggugggcacagaaguagcu

SEQ ID NO: 17090 - RNA, 23 nt, artificial
  Oligomer
aauauggugggcacagaaguagc

SEQ ID NO: 17091 - RNA, 23 nt, artificial
  Oligomer
auggacauuuaagagugaaucag

SEQ ID NO: 17092 - RNA, 23 nt, artificial
  Oligomer
uauggacauuuaagagugaauca

SEQ ID NO: 17093 - RNA, 23 nt, artificial
  Oligomer
gcugacuucccuacaccuaguau

SEQ ID NO: 17094 - RNA, 23 nt, artificial
  Oligomer
agcugacuucccuacaccuagua

SEQ ID NO: 17095 - RNA, 23 nt, artificial
  Oligomer
aagcugacuucccuacaccuagu

SEQ ID NO: 17096 - RNA, 23 nt, artificial
  Oligomer
aaagcugacuucccuacaccuag

SEQ ID NO: 17097 - RNA, 23 nt, artificial
  Oligomer
caaagcugacuucccuacaccua

SEQ ID NO: 17098 - RNA, 23 nt, artificial
  Oligomer
aagugacguuaucagucaaagcu

SEQ ID NO: 17099 - RNA, 23 nt, artificial
  Oligomer
gaagugacguuaucagucaaagc

SEQ ID NO: 17100 - RNA, 23 nt, artificial
  Oligomer
ugaagugacguuaucagucaaag

SEQ ID NO: 17101 - RNA, 23 nt, artificial
  Oligomer
cugaagugacguuaucagucaaa

SEQ ID NO: 17102 - RNA, 23 nt, artificial
  Oligomer
gcugaagugacguuaucagucaa

SEQ ID NO: 17103 - RNA, 23 nt, artificial
  Oligomer
cacuaauaaccucuccauuguga

SEQ ID NO: 17104 - RNA, 23 nt, artificial
  Oligomer
ucacuaauaaccucuccauugug

SEQ ID NO: 17105 - RNA, 23 nt, artificial
  Oligomer
aucacuaauaaccucuccauugu

SEQ ID NO: 17106 - RNA, 23 nt, artificial
  Oligomer
uaucacuaauaaccucuccauug

SEQ ID NO: 17107 - RNA, 23 nt, artificial
  Oligomer
auaucacuaauaaccucuccauu

SEQ ID NO: 17108 - RNA, 23 nt, artificial
  Oligomer
gaaaugucgccucucugaagauu

SEQ ID NO: 17109 - RNA, 23 nt, artificial
  Oligomer
gcuuuuucuccuugguauuucug

SEQ ID NO: 17110 - RNA, 23 nt, artificial
  Oligomer
uccaaagacuuaacugguucaua

SEQ ID NO: 17111 - RNA, 23 nt, artificial
  Oligomer
guccaaagacuuaacugguucau

SEQ ID NO: 17112 - RNA, 23 nt, artificial
  Oligomer
aguccaaagacuuaacugguuca

SEQ ID NO: 17113 - RNA, 23 nt, artificial
  Oligomer
gucaaggaggaaagggauagucc

SEQ ID NO: 17114 - RNA, 23 nt, artificial
  Oligomer
gucaaagcaguagucaaggagga

SEQ ID NO: 17115 - RNA, 23 nt, artificial
  Oligomer
aauuuccucugacauguaagacg

SEQ ID NO: 17116 - RNA, 23 nt, artificial
  Oligomer
uaauuuccucugacauguaagac

SEQ ID NO: 17117 - RNA, 23 nt, artificial
  Oligomer
cuaauuuccucugacauguaaga

SEQ ID NO: 17118 - RNA, 23 nt, artificial
  Oligomer
acuaauuuccucugacauguaag

SEQ ID NO: 17119 - RNA, 23 nt, artificial
  Oligomer
aacuaauuuccucugacauguaa

SEQ ID NO: 17120 - RNA, 23 nt, artificial
  Oligomer
caucuuuaggagacuaauggaaa

SEQ ID NO: 17121 - RNA, 23 nt, artificial
  Oligomer
acaucuuuaggagacuaauggaa

SEQ ID NO: 17122 - RNA, 23 nt, artificial
  Oligomer
aacaucuuuaggagacuaaugga

SEQ ID NO: 17123 - RNA, 23 nt, artificial
  Oligomer
gaacaucuuuaggagacuaaugg

SEQ ID NO: 17124 - RNA, 23 nt, artificial
  Oligomer
ugaacaucuuuaggagacuaaug

SEQ ID NO: 17125 - RNA, 23 nt, artificial
  Oligomer
augaacaucuuuaggagacuaau

SEQ ID NO: 17126 - RNA, 23 nt, artificial
  Oligomer
auauacauauauaugucaggcaa

SEQ ID NO: 17127 - RNA, 23 nt, artificial
  Oligomer
gacuuuagagaauaccaguguua

SEQ ID NO: 17128 - RNA, 23 nt, artificial
  Oligomer
ggacuuuagagaauaccaguguu

SEQ ID NO: 17129 - RNA, 23 nt, artificial
  Oligomer
gugucuagaggaauauggugggc

SEQ ID NO: 17130 - RNA, 23 nt, artificial
  Oligomer
agugucuagaggaauaugguggg

SEQ ID NO: 17131 - RNA, 23 nt, artificial
  Oligomer
aagugucuagaggaauauggugg

SEQ ID NO: 17132 - RNA, 23 nt, artificial
  Oligomer
gaagugucuagaggaauauggug

SEQ ID NO: 17133 - RNA, 23 nt, artificial
  Oligomer
gaaccggaccaucuuugauauca

SEQ ID NO: 17134 - RNA, 23 nt, artificial
  Oligomer
uuugucagcaauacuaagggaag

SEQ ID NO: 17135 - RNA, 23 nt, artificial
  Oligomer
cuuugucagcaauacuaagggaa

SEQ ID NO: 17136 - RNA, 23 nt, artificial
  Oligomer
acuuugucagcaauacuaaggga

SEQ ID NO: 17137 - RNA, 23 nt, artificial
  Oligomer
cuagcaguguuucccguauugac

SEQ ID NO: 17138 - RNA, 23 nt, artificial
  Oligomer
acuagcaguguuucccguauuga

SEQ ID NO: 17139 - RNA, 23 nt, artificial
  Oligomer
uacuagcaguguuucccguauug

SEQ ID NO: 17140 - RNA, 23 nt, artificial
  Oligomer
guacuagcaguguuucccguauu

SEQ ID NO: 17141 - RNA, 23 nt, artificial
  Oligomer
gguacuagcaguguuucccguau

SEQ ID NO: 17142 - RNA, 23 nt, artificial
  Oligomer
gguauuucugggucuuucugaca

SEQ ID NO: 17143 - RNA, 23 nt, artificial
  Oligomer
ugguauuucugggucuuucugac

SEQ ID NO: 17144 - RNA, 23 nt, artificial
  Oligomer
uugguauuucugggucuuucuga

SEQ ID NO: 17145 - RNA, 23 nt, artificial
  Oligomer
cuugguauuucugggucuuucug

SEQ ID NO: 17146 - RNA, 23 nt, artificial
  Oligomer
ccuugguauuucugggucuuucu

SEQ ID NO: 17147 - RNA, 23 nt, artificial
  Oligomer
ccauagggccuccuuagaucccu

SEQ ID NO: 17148 - RNA, 23 nt, artificial
  Oligomer
uccauagggccuccuuagauccc

SEQ ID NO: 17149 - RNA, 23 nt, artificial
  Oligomer
uuccauagggccuccuuagaucc

SEQ ID NO: 17150 - RNA, 23 nt, artificial
  Oligomer
uuuccauagggccuccuuagauc

SEQ ID NO: 17151 - RNA, 23 nt, artificial
  Oligomer
cuuuccauagggccuccuuagau

SEQ ID NO: 17152 - RNA, 23 nt, artificial
  Oligomer
uuaacugguucauauuggacuga

SEQ ID NO: 17153 - RNA, 23 nt, artificial
  Oligomer
cuuaacugguucauauuggacug

SEQ ID NO: 17154 - RNA, 23 nt, artificial
  Oligomer
acuuaacugguucauauuggacu

SEQ ID NO: 17155 - RNA, 23 nt, artificial
  Oligomer
gacuuaacugguucauauuggac

SEQ ID NO: 17156 - RNA, 23 nt, artificial
  Oligomer
guggccuguuaacugguauauac

SEQ ID NO: 17157 - RNA, 23 nt, artificial
  Oligomer
ggugcuucuucacuucaguugcu

SEQ ID NO: 17158 - RNA, 23 nt, artificial
  Oligomer
aggugcuucuucacuucaguugc

SEQ ID NO: 17159 - RNA, 23 nt, artificial
  Oligomer
uaggugcuucuucacuucaguug

SEQ ID NO: 17160 - RNA, 23 nt, artificial
  Oligomer
uuaggugcuucuucacuucaguu

SEQ ID NO: 17161 - RNA, 23 nt, artificial
  Oligomer
cuuaggugcuucuucacuucagu

SEQ ID NO: 17162 - RNA, 23 nt, artificial
  Oligomer
caagcaagagcauuuuccugaua

SEQ ID NO: 17163 - RNA, 23 nt, artificial
  Oligomer
ccaagcaagagcauuuuccugau

SEQ ID NO: 17164 - RNA, 23 nt, artificial
  Oligomer
accaagcaagagcauuuuccuga

SEQ ID NO: 17165 - RNA, 23 nt, artificial
  Oligomer
aaccaagcaagagcauuuuccug

SEQ ID NO: 17166 - RNA, 23 nt, artificial
  Oligomer
caaccaagcaagagcauuuuccu

SEQ ID NO: 17167 - RNA, 23 nt, artificial
  Oligomer
uccugaaacugagcucuaugcug

SEQ ID NO: 17168 - RNA, 23 nt, artificial
  Oligomer
auccugaaacugagcucuaugcu

SEQ ID NO: 17169 - RNA, 23 nt, artificial
  Oligomer
gauccugaaacugagcucuaugc

SEQ ID NO: 17170 - RNA, 23 nt, artificial
  Oligomer
agauccugaaacugagcucuaug

SEQ ID NO: 17171 - RNA, 23 nt, artificial
  Oligomer
aagauccugaaacugagcucuau

SEQ ID NO: 17172 - RNA, 23 nt, artificial
  Oligomer
aucugacuuugaaauuccaacuu

SEQ ID NO: 17173 - RNA, 23 nt, artificial
  Oligomer
uaucugacuuugaaauuccaacu

SEQ ID NO: 17174 - RNA, 23 nt, artificial
  Oligomer
auaucugacuuugaaauuccaac

SEQ ID NO: 17175 - RNA, 23 nt, artificial
  Oligomer
uauaucugacuuugaaauuccaa

SEQ ID NO: 17176 - RNA, 23 nt, artificial
  Oligomer
guauaucugacuuugaaauucca

SEQ ID NO: 17177 - RNA, 23 nt, artificial
  Oligomer
gaagugcccuggucuuacuuggg

SEQ ID NO: 17178 - RNA, 23 nt, artificial
  Oligomer
ggaagugcccuggucuuacuugg

SEQ ID NO: 17179 - RNA, 23 nt, artificial
  Oligomer
gggaagugcccuggucuuacuug

SEQ ID NO: 17180 - RNA, 23 nt, artificial
  Oligomer
ugggaagugcccuggucuuacuu

SEQ ID NO: 17181 - RNA, 23 nt, artificial
  Oligomer
cugggaagugcccuggucuuacu

SEQ ID NO: 17182 - RNA, 23 nt, artificial
  Oligomer
ccuguauucuacagcagauacuu

SEQ ID NO: 17183 - RNA, 23 nt, artificial
  Oligomer
uccuguauucuacagcagauacu

SEQ ID NO: 17184 - RNA, 23 nt, artificial
  Oligomer
uuccuguauucuacagcagauac

SEQ ID NO: 17185 - RNA, 23 nt, artificial
  Oligomer
auuccuguauucuacagcagaua

SEQ ID NO: 17186 - RNA, 23 nt, artificial
  Oligomer
aauuccuguauucuacagcagau

SEQ ID NO: 17187 - RNA, 23 nt, artificial
  Oligomer
accuugcuccuguguaaaacuau

SEQ ID NO: 17188 - RNA, 23 nt, artificial
  Oligomer
aaccuugcuccuguguaaaacua

SEQ ID NO: 17189 - RNA, 23 nt, artificial
  Oligomer
ucugacauguaagacgaaugauu

SEQ ID NO: 17190 - RNA, 23 nt, artificial
  Oligomer
aaacuaauuuccucugacaugua

SEQ ID NO: 17191 - RNA, 23 nt, artificial
  Oligomer
aaaacuaauuuccucugacaugu

SEQ ID NO: 17192 - RNA, 23 nt, artificial
  Oligomer
gaaacuaaauccacaaccuuugg

SEQ ID NO: 17193 - RNA, 23 nt, artificial
  Oligomer
ugaaacuaaauccacaaccuuug

SEQ ID NO: 17194 - RNA, 23 nt, artificial
  Oligomer
gugaaacuaaauccacaaccuuu

SEQ ID NO: 17195 - RNA, 23 nt, artificial
  Oligomer
ugugaaacuaaauccacaaccuu

SEQ ID NO: 17196 - RNA, 23 nt, artificial
  Oligomer
uacaaaagcccaauguaaugcau

SEQ ID NO: 17197 - RNA, 23 nt, artificial
  Oligomer
uuacaaaagcccaauguaaugca

SEQ ID NO: 17198 - RNA, 23 nt, artificial
  Oligomer
uuuacaaaagcccaauguaaugc

SEQ ID NO: 17199 - RNA, 23 nt, artificial
  Oligomer
guuuacaaaagcccaauguaaug

SEQ ID NO: 17200 - RNA, 23 nt, artificial
  Oligomer
uguuuacaaaagcccaauguaau

SEQ ID NO: 17201 - RNA, 23 nt, artificial
  Oligomer
cugauuuccuaaugucagaguag

SEQ ID NO: 17202 - RNA, 23 nt, artificial
  Oligomer
ucugauuuccuaaugucagagua

SEQ ID NO: 17203 - RNA, 23 nt, artificial
  Oligomer
aucugauuuccuaaugucagagu

SEQ ID NO: 17204 - RNA, 23 nt, artificial
  Oligomer
uaucugauuuccuaaugucagag

SEQ ID NO: 17205 - RNA, 23 nt, artificial
  Oligomer
cuaucugauuuccuaaugucaga

SEQ ID NO: 17206 - RNA, 23 nt, artificial
  Oligomer
uguggccuguuaacugguauaua

SEQ ID NO: 17207 - RNA, 23 nt, artificial
  Oligomer
guguacgcccuguauaacagugu

SEQ ID NO: 17208 - RNA, 23 nt, artificial
  Oligomer
aguguacgcccuguauaacagug

SEQ ID NO: 17209 - RNA, 23 nt, artificial
  Oligomer
cccauccugggccauuaccuuaa

SEQ ID NO: 17210 - RNA, 23 nt, artificial
  Oligomer
ucccauccugggccauuaccuua

SEQ ID NO: 17211 - RNA, 23 nt, artificial
  Oligomer
cucccauccugggccauuaccuu

SEQ ID NO: 17212 - RNA, 23 nt, artificial
  Oligomer
caacuggaauacaaccaagcaag

SEQ ID NO: 17213 - RNA, 23 nt, artificial
  Oligomer
ucaacuggaauacaaccaagcaa

SEQ ID NO: 17214 - RNA, 23 nt, artificial
  Oligomer
guauggacauuuaagagugaauc

SEQ ID NO: 17215 - RNA, 23 nt, artificial
  Oligomer
aguauggacauuuaagagugaau

SEQ ID NO: 17216 - RNA, 23 nt, artificial
  Oligomer
aaguauggacauuuaagagugaa

SEQ ID NO: 17217 - RNA, 23 nt, artificial
  Oligomer
agcaaacuggauuucaauaugac

SEQ ID NO: 17218 - RNA, 23 nt, artificial
  Oligomer
ucauugcuuuauagacuguaaga

SEQ ID NO: 17219 - RNA, 23 nt, artificial
  Oligomer
aacaccuggcugaagugacguua

SEQ ID NO: 17220 - RNA, 23 nt, artificial
  Oligomer
ugaagagcuggcacaaacucgca

SEQ ID NO: 17221 - RNA, 23 nt, artificial
  Oligomer
uugaagagcuggcacaaacucgc

SEQ ID NO: 17222 - RNA, 23 nt, artificial
  Oligomer
uguggucacaauguuucuguuga

SEQ ID NO: 17223 - RNA, 23 nt, artificial
  Oligomer
cuguggucacaauguuucuguug

SEQ ID NO: 17224 - RNA, 23 nt, artificial
  Oligomer
ccuguggucacaauguuucuguu

SEQ ID NO: 17225 - RNA, 23 nt, artificial
  Oligomer
aacaaaguugaaccguuucuuua

SEQ ID NO: 17226 - RNA, 23 nt, artificial
  Oligomer
uacuuugucagcaauacuaaggg

SEQ ID NO: 17227 - RNA, 23 nt, artificial
  Oligomer
auacuuugucagcaauacuaagg

SEQ ID NO: 17228 - RNA, 23 nt, artificial
  Oligomer
gauacuuugucagcaauacuaag

SEQ ID NO: 17229 - RNA, 23 nt, artificial
  Oligomer
agauacuuugucagcaauacuaa

SEQ ID NO: 17230 - RNA, 23 nt, artificial
  Oligomer
gaaguggacgcaacuuaagcugg

SEQ ID NO: 17231 - RNA, 23 nt, artificial
  Oligomer
ucucuguguguuuuguaaacauc

SEQ ID NO: 17232 - RNA, 23 nt, artificial
  Oligomer
ucuucaaaugucuaagguaguaa

SEQ ID NO: 17233 - RNA, 23 nt, artificial
  Oligomer
aucuucaaaugucuaagguagua

SEQ ID NO: 17234 - RNA, 23 nt, artificial
  Oligomer
uaucuucaaaugucuaagguagu

SEQ ID NO: 17235 - RNA, 23 nt, artificial
  Oligomer
cuaucuucaaaugucuaagguag

SEQ ID NO: 17236 - RNA, 23 nt, artificial
  Oligomer
aguaagcuaucuucaaaugucua

SEQ ID NO: 17237 - RNA, 23 nt, artificial
  Oligomer
ugcauaggaaguauggcaugaac

SEQ ID NO: 17238 - RNA, 23 nt, artificial
  Oligomer
augcauaggaaguauggcaugaa

SEQ ID NO: 17239 - RNA, 23 nt, artificial
  Oligomer
aaugcauaggaaguauggcauga

SEQ ID NO: 17240 - RNA, 23 nt, artificial
  Oligomer
gcugcuggaaguagaauuugucc

SEQ ID NO: 17241 - RNA, 23 nt, artificial
  Oligomer
ugcugcuggaaguagaauuuguc

SEQ ID NO: 17242 - RNA, 23 nt, artificial
  Oligomer
gugcugcuggaaguagaauuugu

SEQ ID NO: 17243 - RNA, 23 nt, artificial
  Oligomer
ucaggcaaagugcugcuggaagu

SEQ ID NO: 17244 - RNA, 23 nt, artificial
  Oligomer
gucaggcaaagugcugcuggaag

SEQ ID NO: 17245 - RNA, 23 nt, artificial
  Oligomer
ugucaggcaaagugcugcuggaa

SEQ ID NO: 17246 - RNA, 23 nt, artificial
  Oligomer
cccgaauuauaaaggccagcgcc

SEQ ID NO: 17247 - RNA, 23 nt, artificial
  Oligomer
acccgaauuauaaaggccagcgc

SEQ ID NO: 17248 - RNA, 23 nt, artificial
  Oligomer
gacccgaauuauaaaggccagcg

SEQ ID NO: 17249 - RNA, 23 nt, artificial
  Oligomer
ugacccgaauuauaaaggccagc

SEQ ID NO: 17250 - RNA, 23 nt, artificial
  Oligomer
gugacccgaauuauaaaggccag

SEQ ID NO: 17251 - RNA, 23 nt, artificial
  Oligomer
ugaccuugaucaagguguuuuga

SEQ ID NO: 17252 - RNA, 23 nt, artificial
  Oligomer
gugaccuugaucaagguguuuug

SEQ ID NO: 17253 - RNA, 23 nt, artificial
  Oligomer
ggugaccuugaucaagguguuuu

SEQ ID NO: 17254 - RNA, 23 nt, artificial
  Oligomer
uggugaccuugaucaagguguuu

SEQ ID NO: 17255 - RNA, 23 nt, artificial
  Oligomer
cuggugaccuugaucaagguguu

SEQ ID NO: 17256 - RNA, 23 nt, artificial
  Oligomer
caccuugcccuuuacguaucugc

SEQ ID NO: 17257 - RNA, 23 nt, artificial
  Oligomer
gaacuuccucagauggacaagau

SEQ ID NO: 17258 - RNA, 23 nt, artificial
  Oligomer
ggaacuuccucagauggacaaga

SEQ ID NO: 17259 - RNA, 23 nt, artificial
  Oligomer
gggaacuuccucagauggacaag

SEQ ID NO: 17260 - RNA, 23 nt, artificial
  Oligomer
ugggaacuuccucagauggacaa

SEQ ID NO: 17261 - RNA, 23 nt, artificial
  Oligomer
cugggaacuuccucagauggaca

SEQ ID NO: 17262 - RNA, 23 nt, artificial
  Oligomer
gggcugaaaagaucugaaggucc

SEQ ID NO: 17263 - RNA, 23 nt, artificial
  Oligomer
ggggcugaaaagaucugaagguc

SEQ ID NO: 17264 - RNA, 23 nt, artificial
  Oligomer
aggggcugaaaagaucugaaggu

SEQ ID NO: 17265 - RNA, 23 nt, artificial
  Oligomer
aaggggcugaaaagaucugaagg

SEQ ID NO: 17266 - RNA, 23 nt, artificial
  Oligomer
caaggggcugaaaagaucugaag

SEQ ID NO: 17267 - RNA, 23 nt, artificial
  Oligomer
ccacagcuucaugugucucauca

SEQ ID NO: 17268 - RNA, 23 nt, artificial
  Oligomer
accacagcuucaugugucucauc

SEQ ID NO: 17269 - RNA, 23 nt, artificial
  Oligomer
aaccacagcuucaugugucucau

SEQ ID NO: 17270 - RNA, 23 nt, artificial
  Oligomer
gucaaagcugacuucccuacacc

SEQ ID NO: 17271 - RNA, 23 nt, artificial
  Oligomer
agucaaagcugacuucccuacac

SEQ ID NO: 17272 - RNA, 23 nt, artificial
  Oligomer
cagucaaagcugacuucccuaca

SEQ ID NO: 17273 - RNA, 23 nt, artificial
  Oligomer
ucagucaaagcugacuucccuac

SEQ ID NO: 17274 - RNA, 23 nt, artificial
  Oligomer
aucagucaaagcugacuucccua

SEQ ID NO: 17275 - RNA, 23 nt, artificial
  Oligomer
aacucgcaucuacuggcaaaagg

SEQ ID NO: 17276 - RNA, 23 nt, artificial
  Oligomer
aaacucgcaucuacuggcaaaag

SEQ ID NO: 17277 - RNA, 23 nt, artificial
  Oligomer
caaacucgcaucuacuggcaaaa

SEQ ID NO: 17278 - RNA, 23 nt, artificial
  Oligomer
acaaacucgcaucuacuggcaaa

SEQ ID NO: 17279 - RNA, 23 nt, artificial
  Oligomer
guuucuguugaagagcuggcaca

SEQ ID NO: 17280 - RNA, 23 nt, artificial
  Oligomer
gaaagaaguggcaacgcuguccu

SEQ ID NO: 17281 - RNA, 23 nt, artificial
  Oligomer
ugaaagaaguggcaacgcugucc

SEQ ID NO: 17282 - RNA, 23 nt, artificial
  Oligomer
gugaaagaaguggcaacgcuguc

SEQ ID NO: 17283 - RNA, 23 nt, artificial
  Oligomer
agugaaagaaguggcaacgcugu

SEQ ID NO: 17284 - RNA, 23 nt, artificial
  Oligomer
aagugaaagaaguggcaacgcug

SEQ ID NO: 17285 - RNA, 23 nt, artificial
  Oligomer
guccauaccucaauuucuuucag

SEQ ID NO: 17286 - RNA, 23 nt, artificial
  Oligomer
uguccauaccucaauuucuuuca

SEQ ID NO: 17287 - RNA, 23 nt, artificial
  Oligomer
guguccauaccucaauuucuuuc

SEQ ID NO: 17288 - RNA, 23 nt, artificial
  Oligomer
aguguccauaccucaauuucuuu

SEQ ID NO: 17289 - RNA, 23 nt, artificial
  Oligomer
aaguguccauaccucaauuucuu

SEQ ID NO: 17290 - RNA, 23 nt, artificial
  Oligomer
guaauuccuguauucuacagcag

SEQ ID NO: 17291 - RNA, 23 nt, artificial
  Oligomer
aguaauuccuguauucuacagca

SEQ ID NO: 17292 - RNA, 23 nt, artificial
  Oligomer
aaguaauuccuguauucuacagc

SEQ ID NO: 17293 - RNA, 23 nt, artificial
  Oligomer
uaaguaauuccuguauucuacag

SEQ ID NO: 17294 - RNA, 23 nt, artificial
  Oligomer
cuaaguaauuccuguauucuaca

SEQ ID NO: 17295 - RNA, 23 nt, artificial
  Oligomer
aguugugaugacuauguuucuau

SEQ ID NO: 17296 - RNA, 23 nt, artificial
  Oligomer
guauugacaggaauacuuaacuc

SEQ ID NO: 17297 - RNA, 23 nt, artificial
  Oligomer
cguauugacaggaauacuuaacu

SEQ ID NO: 17298 - RNA, 23 nt, artificial
  Oligomer
ccguauugacaggaauacuuaac

SEQ ID NO: 17299 - RNA, 23 nt, artificial
  Oligomer
cccguauugacaggaauacuuaa

SEQ ID NO: 17300 - RNA, 23 nt, artificial
  Oligomer
ucccguauugacaggaauacuua

SEQ ID NO: 17301 - RNA, 23 nt, artificial
  Oligomer
aguguuucccguauugacaggaa

SEQ ID NO: 17302 - RNA, 23 nt, artificial
  Oligomer
caguguuucccguauugacagga

SEQ ID NO: 17303 - RNA, 23 nt, artificial
  Oligomer
gcaguguuucccguauugacagg

SEQ ID NO: 17304 - RNA, 23 nt, artificial
  Oligomer
agcaguguuucccguauugacag

SEQ ID NO: 17305 - RNA, 23 nt, artificial
  Oligomer
uagcaguguuucccguauugaca

SEQ ID NO: 17306 - RNA, 23 nt, artificial
  Oligomer
uucacaaaccuugcuccugugua

SEQ ID NO: 17307 - RNA, 23 nt, artificial
  Oligomer
cuguguguuuuguaaacaucacu

SEQ ID NO: 17308 - RNA, 23 nt, artificial
  Oligomer
ucuguguguuuuguaaacaucac

SEQ ID NO: 17309 - RNA, 23 nt, artificial
  Oligomer
cucuguguguuuuguaaacauca

SEQ ID NO: 17310 - RNA, 23 nt, artificial
  Oligomer
caaaugucuaagguaguaacuuu

SEQ ID NO: 17311 - RNA, 23 nt, artificial
  Oligomer
ucaaaugucuaagguaguaacuu

SEQ ID NO: 17312 - RNA, 23 nt, artificial
  Oligomer
uucaaaugucuaagguaguaacu

SEQ ID NO: 17313 - RNA, 23 nt, artificial
  Oligomer
cuucaaaugucuaagguaguaac

SEQ ID NO: 17314 - RNA, 23 nt, artificial
  Oligomer
cucccccaugagguacagcagaa

SEQ ID NO: 17315 - RNA, 23 nt, artificial
  Oligomer
ggucaacuucagagacuaucuga

SEQ ID NO: 17316 - RNA, 23 nt, artificial
  Oligomer
gaaguagaauuuguccaauaaca

SEQ ID NO: 17317 - RNA, 23 nt, artificial
  Oligomer
gucuagaggaauauggugggcac

SEQ ID NO: 17318 - RNA, 23 nt, artificial
  Oligomer
acaaccaagcaagagcauuuucc

SEQ ID NO: 17319 - RNA, 23 nt, artificial
  Oligomer
uacaaccaagcaagagcauuuuc

SEQ ID NO: 17320 - RNA, 23 nt, artificial
  Oligomer
auacaaccaagcaagagcauuuu

SEQ ID NO: 17321 - RNA, 23 nt, artificial
  Oligomer
aauacaaccaagcaagagcauuu

SEQ ID NO: 17322 - RNA, 23 nt, artificial
  Oligomer
accucuccugguuggaaaaugga

SEQ ID NO: 17323 - RNA, 23 nt, artificial
  Oligomer
ucugacuuugaaauuccaacuuc

SEQ ID NO: 17324 - RNA, 23 nt, artificial
  Oligomer
caucugacgagggcacauacgag

SEQ ID NO: 17325 - RNA, 23 nt, artificial
  Oligomer
ccaucugacgagggcacauacga

SEQ ID NO: 17326 - RNA, 23 nt, artificial
  Oligomer
cccaucugacgagggcacauacg

SEQ ID NO: 17327 - RNA, 23 nt, artificial
  Oligomer
gcccaucugacgagggcacauac

SEQ ID NO: 17328 - RNA, 23 nt, artificial
  Oligomer
cgcccaucugacgagggcacaua

SEQ ID NO: 17329 - RNA, 23 nt, artificial
  Oligomer
ggacaugaauauauggcccgagu

SEQ ID NO: 17330 - RNA, 23 nt, artificial
  Oligomer
gggacaugaauauauggcccgag

SEQ ID NO: 17331 - RNA, 23 nt, artificial
  Oligomer
ggggacaugaauauauggcccga

SEQ ID NO: 17332 - RNA, 23 nt, artificial
  Oligomer
gucgccucucugaagauuaccca

SEQ ID NO: 17333 - RNA, 23 nt, artificial
  Oligomer
caauguuucuguugaagagcugg

SEQ ID NO: 17334 - RNA, 23 nt, artificial
  Oligomer
acaauguuucuguugaagagcug

SEQ ID NO: 17335 - RNA, 23 nt, artificial
  Oligomer
cacaauguuucuguugaagagcu

SEQ ID NO: 17336 - RNA, 23 nt, artificial
  Oligomer
cacuucuguucagguguuaucca

SEQ ID NO: 17337 - RNA, 23 nt, artificial
  Oligomer
ucacuucuguucagguguuaucc

SEQ ID NO: 17338 - RNA, 23 nt, artificial
  Oligomer
cucacuucuguucagguguuauc

SEQ ID NO: 17339 - RNA, 23 nt, artificial
  Oligomer
ucucacuucuguucagguguuau

SEQ ID NO: 17340 - RNA, 23 nt, artificial
  Oligomer
uucucacuucuguucagguguua

SEQ ID NO: 17341 - RNA, 23 nt, artificial
  Oligomer
gcccuggucuuacuuggguccaa

SEQ ID NO: 17342 - RNA, 23 nt, artificial
  Oligomer
cccauggcuuuagcuaccucacu

SEQ ID NO: 17343 - RNA, 23 nt, artificial
  Oligomer
gcccauggcuuuagcuaccucac

SEQ ID NO: 17344 - RNA, 23 nt, artificial
  Oligomer
agcccauggcuuuagcuaccuca

SEQ ID NO: 17345 - RNA, 23 nt, artificial
  Oligomer
uagaccagaaguggacgcaacuu

SEQ ID NO: 17346 - RNA, 23 nt, artificial
  Oligomer
cuagaccagaaguggacgcaacu

SEQ ID NO: 17347 - RNA, 23 nt, artificial
  Oligomer
acuagaccagaaguggacgcaac

SEQ ID NO: 17348 - RNA, 23 nt, artificial
  Oligomer
cacuagaccagaaguggacgcaa

SEQ ID NO: 17349 - RNA, 23 nt, artificial
  Oligomer
ggaacacccuccaaucucugugu

SEQ ID NO: 17350 - RNA, 23 nt, artificial
  Oligomer
aggaacacccuccaaucucugug

SEQ ID NO: 17351 - RNA, 23 nt, artificial
  Oligomer
caggaacacccuccaaucucugu

SEQ ID NO: 17352 - RNA, 23 nt, artificial
  Oligomer
ccaggaacacccuccaaucucug

SEQ ID NO: 17353 - RNA, 23 nt, artificial
  Oligomer
cccaggaacacccuccaaucucu

SEQ ID NO: 17354 - RNA, 23 nt, artificial
  Oligomer
aaugucuaagguaguaacuuucc

SEQ ID NO: 17355 - RNA, 23 nt, artificial
  Oligomer
aaaugucuaagguaguaacuuuc

SEQ ID NO: 17356 - RNA, 23 nt, artificial
  Oligomer
uagguacgucaaagcaguaguca

SEQ ID NO: 17357 - RNA, 23 nt, artificial
  Oligomer
uuagguacgucaaagcaguaguc

SEQ ID NO: 17358 - RNA, 23 nt, artificial
  Oligomer
uuuagguacgucaaagcaguagu

SEQ ID NO: 17359 - RNA, 23 nt, artificial
  Oligomer
auuuccucugacauguaagacga

SEQ ID NO: 17360 - RNA, 23 nt, artificial
  Oligomer
gcuguuuacaaaagcccaaugua

SEQ ID NO: 17361 - RNA, 23 nt, artificial
  Oligomer
ugcuguuuacaaaagcccaaugu

SEQ ID NO: 17362 - RNA, 23 nt, artificial
  Oligomer
cugcuguuuacaaaagcccaaug

SEQ ID NO: 17363 - RNA, 23 nt, artificial
  Oligomer
gcugcuguuuacaaaagcccaau

SEQ ID NO: 17364 - RNA, 23 nt, artificial
  Oligomer
ugcugcuguuuacaaaagcccaa

SEQ ID NO: 17365 - RNA, 23 nt, artificial
  Oligomer
ugagugaacucaaacccucugua

SEQ ID NO: 17366 - RNA, 23 nt, artificial
  Oligomer
auaacaggucaacuucagagacu

SEQ ID NO: 17367 - RNA, 23 nt, artificial
  Oligomer
aauaacaggucaacuucagagac

SEQ ID NO: 17368 - RNA, 23 nt, artificial
  Oligomer
cuguggccuguuaacugguauau

SEQ ID NO: 17369 - RNA, 23 nt, artificial
  Oligomer
acuguggccuguuaacugguaua

SEQ ID NO: 17370 - RNA, 23 nt, artificial
  Oligomer
gagaauaccaguguuauuaauga

SEQ ID NO: 17371 - RNA, 23 nt, artificial
  Oligomer
aguagcucuggugaccuugauca

SEQ ID NO: 17372 - RNA, 23 nt, artificial
  Oligomer
aaguagcucuggugaccuugauc

SEQ ID NO: 17373 - RNA, 23 nt, artificial
  Oligomer
gaaguagcucuggugaccuugau

SEQ ID NO: 17374 - RNA, 23 nt, artificial
  Oligomer
agaaguagcucuggugaccuuga

SEQ ID NO: 17375 - RNA, 23 nt, artificial
  Oligomer
auugagaagggaaaguguacgcc

SEQ ID NO: 17376 - RNA, 23 nt, artificial
  Oligomer
aagcaagagcauuuuccugauaa

SEQ ID NO: 17377 - RNA, 23 nt, artificial
  Oligomer
cuucccuacaccuaguauaucug

SEQ ID NO: 17378 - RNA, 23 nt, artificial
  Oligomer
acuucccuacaccuaguauaucu

SEQ ID NO: 17379 - RNA, 23 nt, artificial
  Oligomer
gacuucccuacaccuaguauauc

SEQ ID NO: 17380 - RNA, 23 nt, artificial
  Oligomer
ugacuucccuacaccuaguauau

SEQ ID NO: 17381 - RNA, 23 nt, artificial
  Oligomer
cugacuucccuacaccuaguaua

SEQ ID NO: 17382 - RNA, 23 nt, artificial
  Oligomer
gaagugaaagaaguggcaacgcu

SEQ ID NO: 17383 - RNA, 23 nt, artificial
  Oligomer
uggcuggucuuucucacuucugu

SEQ ID NO: 17384 - RNA, 23 nt, artificial
  Oligomer
cuggcuggucuuucucacuucug

SEQ ID NO: 17385 - RNA, 23 nt, artificial
  Oligomer
gcuggcuggucuuucucacuucu

SEQ ID NO: 17386 - RNA, 23 nt, artificial
  Oligomer
caaguguccauaccucaauuucu

SEQ ID NO: 17387 - RNA, 23 nt, artificial
  Oligomer
cacuuuugacccuaagcaucuga

SEQ ID NO: 17388 - RNA, 23 nt, artificial
  Oligomer
ucacuuuugacccuaagcaucug

SEQ ID NO: 17389 - RNA, 23 nt, artificial
  Oligomer
uucacuuuugacccuaagcaucu

SEQ ID NO: 17390 - RNA, 23 nt, artificial
  Oligomer
uuucacuuuugacccuaagcauc

SEQ ID NO: 17391 - RNA, 23 nt, artificial
  Oligomer
aucacuggagggucuucuacgug

SEQ ID NO: 17392 - RNA, 23 nt, artificial
  Oligomer
caucacuggagggucuucuacgu

SEQ ID NO: 17393 - RNA, 23 nt, artificial
  Oligomer
acaucacuggagggucuucuacg

SEQ ID NO: 17394 - RNA, 23 nt, artificial
  Oligomer
aacaucacuggagggucuucuac

SEQ ID NO: 17395 - RNA, 23 nt, artificial
  Oligomer
aaacaucacuggagggucuucua

SEQ ID NO: 17396 - RNA, 23 nt, artificial
  Oligomer
ggucuaacaccaacauaagguac

SEQ ID NO: 17397 - RNA, 23 nt, artificial
  Oligomer
guguguuuuguaaacaucacugg

SEQ ID NO: 17398 - RNA, 23 nt, artificial
  Oligomer
uguguguuuuguaaacaucacug

SEQ ID NO: 17399 - RNA, 23 nt, artificial
  Oligomer
guggacgcaacuuaagcugggau

SEQ ID NO: 17400 - RNA, 23 nt, artificial
  Oligomer
aguggacgcaacuuaagcuggga

SEQ ID NO: 17401 - RNA, 23 nt, artificial
  Oligomer
aagguaguaacuuuccauagggc

SEQ ID NO: 17402 - RNA, 23 nt, artificial
  Oligomer
uaagguaguaacuuuccauaggg

SEQ ID NO: 17403 - RNA, 23 nt, artificial
  Oligomer
guacuaagcaguaagcuaucuuc

SEQ ID NO: 17404 - RNA, 23 nt, artificial
  Oligomer
uguacuaagcaguaagcuaucuu

SEQ ID NO: 17405 - RNA, 23 nt, artificial
  Oligomer
auguacuaagcaguaagcuaucu

SEQ ID NO: 17406 - RNA, 23 nt, artificial
  Oligomer
uauguacuaagcaguaagcuauc

SEQ ID NO: 17407 - RNA, 23 nt, artificial
  Oligomer
guauguacuaagcaguaagcuau

SEQ ID NO: 17408 - RNA, 23 nt, artificial
  Oligomer
uaugcuaguuugaccucauuugu

SEQ ID NO: 17409 - RNA, 23 nt, artificial
  Oligomer
uuaugcuaguuugaccucauuug

SEQ ID NO: 17410 - RNA, 23 nt, artificial
  Oligomer
uuuaugcuaguuugaccucauuu

SEQ ID NO: 17411 - RNA, 23 nt, artificial
  Oligomer
cuuuaugcuaguuugaccucauu

SEQ ID NO: 17412 - RNA, 23 nt, artificial
  Oligomer
gcuuuaugcuaguuugaccucau

SEQ ID NO: 17413 - RNA, 23 nt, artificial
  Oligomer
auuuagguacgucaaagcaguag

SEQ ID NO: 17414 - RNA, 23 nt, artificial
  Oligomer
gauuuagguacgucaaagcagua

SEQ ID NO: 17415 - RNA, 23 nt, artificial
  Oligomer
cagaguagaagauuuuaugcugc

SEQ ID NO: 17416 - RNA, 23 nt, artificial
  Oligomer
ucagaguagaagauuuuaugcug

SEQ ID NO: 17417 - RNA, 23 nt, artificial
  Oligomer
cugcuggaaguagaauuugucca

SEQ ID NO: 17418 - RNA, 23 nt, artificial
  Oligomer
gaauuuuugugauaugcugccug

SEQ ID NO: 17419 - RNA, 23 nt, artificial
  Oligomer
ggaauuuuugugauaugcugccu

SEQ ID NO: 17420 - RNA, 23 nt, artificial
  Oligomer
uggaauuuuugugauaugcugcc

SEQ ID NO: 17421 - RNA, 23 nt, artificial
  Oligomer
auggaauuuuugugauaugcugc

SEQ ID NO: 17422 - RNA, 23 nt, artificial
  Oligomer
aauggaauuuuugugauaugcug

SEQ ID NO: 17423 - RNA, 23 nt, artificial
  Oligomer
cugggccauuaccuuaaucucag

SEQ ID NO: 17424 - RNA, 23 nt, artificial
  Oligomer
cuguaagaagagaacaucucaga

SEQ ID NO: 17425 - RNA, 23 nt, artificial
  Oligomer
acuguaagaagagaacaucucag

SEQ ID NO: 17426 - RNA, 23 nt, artificial
  Oligomer
caugugucucaucaaguauggac

SEQ ID NO: 17427 - RNA, 23 nt, artificial
  Oligomer
agugacguuaucagucaaagcug

SEQ ID NO: 17428 - RNA, 23 nt, artificial
  Oligomer
ugucgccucucugaagauuaccc

SEQ ID NO: 17429 - RNA, 23 nt, artificial
  Oligomer
augucgccucucugaagauuacc

SEQ ID NO: 17430 - RNA, 23 nt, artificial
  Oligomer
aaugucgccucucugaagauuac

SEQ ID NO: 17431 - RNA, 23 nt, artificial
  Oligomer
aaaugucgccucucugaagauua

SEQ ID NO: 17432 - RNA, 23 nt, artificial
  Oligomer
acuuggguccaaauuguuggcuu

SEQ ID NO: 17433 - RNA, 23 nt, artificial
  Oligomer
acauggcugggauuuaaagccuu

SEQ ID NO: 17434 - RNA, 23 nt, artificial
  Oligomer
cuuaagcugggauaaucacauua

SEQ ID NO: 17435 - RNA, 23 nt, artificial
  Oligomer
ugccuuccacaauucacuagacc

SEQ ID NO: 17436 - RNA, 23 nt, artificial
  Oligomer
cugccuuccacaauucacuagac

SEQ ID NO: 17437 - RNA, 23 nt, artificial
  Oligomer
acugccuuccacaauucacuaga

SEQ ID NO: 17438 - RNA, 23 nt, artificial
  Oligomer
aacugccuuccacaauucacuag

SEQ ID NO: 17439 - RNA, 23 nt, artificial
  Oligomer
aaacugccuuccacaauucacua

SEQ ID NO: 17440 - RNA, 23 nt, artificial
  Oligomer
ccaacugcuguucauguuacuca

SEQ ID NO: 17441 - RNA, 23 nt, artificial
  Oligomer
gccaacugcuguucauguuacuc

SEQ ID NO: 17442 - RNA, 23 nt, artificial
  Oligomer
agccaacugcuguucauguuacu

SEQ ID NO: 17443 - RNA, 23 nt, artificial
  Oligomer
uagccaacugcuguucauguuac

SEQ ID NO: 17444 - RNA, 23 nt, artificial
  Oligomer
auagccaacugcuguucauguua

SEQ ID NO: 17445 - RNA, 23 nt, artificial
  Oligomer
uccuugguauuucugggucuuuc

SEQ ID NO: 17446 - RNA, 23 nt, artificial
  Oligomer
cuccuugguauuucugggucuuu

SEQ ID NO: 17447 - RNA, 23 nt, artificial
  Oligomer
ucuccuugguauuucugggucuu

SEQ ID NO: 17448 - RNA, 23 nt, artificial
  Oligomer
uucuccuugguauuucugggucu

SEQ ID NO: 17449 - RNA, 23 nt, artificial
  Oligomer
guguauguacuaagcaguaagcu

SEQ ID NO: 17450 - RNA, 23 nt, artificial
  Oligomer
aguguauguacuaagcaguaagc

SEQ ID NO: 17451 - RNA, 23 nt, artificial
  Oligomer
augcuaguuugaccucauuugua

SEQ ID NO: 17452 - RNA, 23 nt, artificial
  Oligomer
uggcuuuaugcuaguuugaccuc

SEQ ID NO: 17453 - RNA, 23 nt, artificial
  Oligomer
auggcuuuaugcuaguuugaccu

SEQ ID NO: 17454 - RNA, 23 nt, artificial
  Oligomer
aauggcuuuaugcuaguuugacc

SEQ ID NO: 17455 - RNA, 23 nt, artificial
  Oligomer
aaauggcuuuaugcuaguuugac

SEQ ID NO: 17456 - RNA, 23 nt, artificial
  Oligomer
uaaauggcuuuaugcuaguuuga

SEQ ID NO: 17457 - RNA, 23 nt, artificial
  Oligomer
ugauuuagguacgucaaagcagu

SEQ ID NO: 17458 - RNA, 23 nt, artificial
  Oligomer
uauugguguuuacccaguauucc

SEQ ID NO: 17459 - RNA, 23 nt, artificial
  Oligomer
uuauugguguuuacccaguauuc

SEQ ID NO: 17460 - RNA, 23 nt, artificial
  Oligomer
auuauugguguuuacccaguauu

SEQ ID NO: 17461 - RNA, 23 nt, artificial
  Oligomer
uauuauugguguuuacccaguau

SEQ ID NO: 17462 - RNA, 23 nt, artificial
  Oligomer
auauuauugguguuuacccagua

SEQ ID NO: 17463 - RNA, 23 nt, artificial
  Oligomer
guauggcaugaacaucuuuagga

SEQ ID NO: 17464 - RNA, 23 nt, artificial
  Oligomer
aguauggcaugaacaucuuuagg

SEQ ID NO: 17465 - RNA, 23 nt, artificial
  Oligomer
aaguauggcaugaacaucuuuag

SEQ ID NO: 17466 - RNA, 23 nt, artificial
  Oligomer
gaaguauggcaugaacaucuuua

SEQ ID NO: 17467 - RNA, 23 nt, artificial
  Oligomer
cuguuuacaaaagcccaauguaa

SEQ ID NO: 17468 - RNA, 23 nt, artificial
  Oligomer
gcucuuucccuuuaucaguuuga

SEQ ID NO: 17469 - RNA, 23 nt, artificial
  Oligomer
ugcucuuucccuuuaucaguuug

SEQ ID NO: 17470 - RNA, 23 nt, artificial
  Oligomer
gugcucuuucccuuuaucaguuu

SEQ ID NO: 17471 - RNA, 23 nt, artificial
  Oligomer
ggugcucuuucccuuuaucaguu

SEQ ID NO: 17472 - RNA, 23 nt, artificial
  Oligomer
uggugcucuuucccuuuaucagu

SEQ ID NO: 17473 - RNA, 23 nt, artificial
  Oligomer
augcagaauucuugaguucugga

SEQ ID NO: 17474 - RNA, 23 nt, artificial
  Oligomer
aauugaccucuucugggaacuuc

SEQ ID NO: 17475 - RNA, 23 nt, artificial
  Oligomer
acacaacaguuucccaagauccu

SEQ ID NO: 17476 - RNA, 23 nt, artificial
  Oligomer
aacacaacaguuucccaagaucc

SEQ ID NO: 17477 - RNA, 23 nt, artificial
  Oligomer
agaauuaaaugccaucaacacaa

SEQ ID NO: 17478 - RNA, 23 nt, artificial
  Oligomer
aagaauuaaaugccaucaacaca

SEQ ID NO: 17479 - RNA, 23 nt, artificial
  Oligomer
gaagaauuaaaugccaucaacac

SEQ ID NO: 17480 - RNA, 23 nt, artificial
  Oligomer
agaagaauuaaaugccaucaaca

SEQ ID NO: 17481 - RNA, 23 nt, artificial
  Oligomer
gagguuuuccagagccucaccuc

SEQ ID NO: 17482 - RNA, 23 nt, artificial
  Oligomer
ggagguuuuccagagccucaccu

SEQ ID NO: 17483 - RNA, 23 nt, artificial
  Oligomer
uggagguuuuccagagccucacc

SEQ ID NO: 17484 - RNA, 23 nt, artificial
  Oligomer
cuggagguuuuccagagccucac

SEQ ID NO: 17485 - RNA, 23 nt, artificial
  Oligomer
ucuggagguuuuccagagccuca

SEQ ID NO: 17486 - RNA, 23 nt, artificial
  Oligomer
gugauuugucauugcuuuauaga

SEQ ID NO: 17487 - RNA, 23 nt, artificial
  Oligomer
agugauuugucauugcuuuauag

SEQ ID NO: 17488 - RNA, 23 nt, artificial
  Oligomer
aagugauuugucauugcuuuaua

SEQ ID NO: 17489 - RNA, 23 nt, artificial
  Oligomer
aaagugauuugucauugcuuuau

SEQ ID NO: 17490 - RNA, 23 nt, artificial
  Oligomer
aaaagugauuugucauugcuuua

SEQ ID NO: 17491 - RNA, 23 nt, artificial
  Oligomer
ucucaaaugcacaucucauggca

SEQ ID NO: 17492 - RNA, 23 nt, artificial
  Oligomer
uucucaaaugcacaucucauggc

SEQ ID NO: 17493 - RNA, 23 nt, artificial
  Oligomer
uuucucaaaugcacaucucaugg

SEQ ID NO: 17494 - RNA, 23 nt, artificial
  Oligomer
auuucucaaaugcacaucucaug

SEQ ID NO: 17495 - RNA, 23 nt, artificial
  Oligomer
cauuucucaaaugcacaucucau

SEQ ID NO: 17496 - RNA, 23 nt, artificial
  Oligomer
caacauuucucaaaugcacaucu

SEQ ID NO: 17497 - RNA, 23 nt, artificial
  Oligomer
acaacauuucucaaaugcacauc

SEQ ID NO: 17498 - RNA, 23 nt, artificial
  Oligomer
gacaacauuucucaaaugcacau

SEQ ID NO: 17499 - RNA, 23 nt, artificial
  Oligomer
agacaacauuucucaaaugcaca

SEQ ID NO: 17500 - RNA, 23 nt, artificial
  Oligomer
aagacaacauuucucaaaugcac

SEQ ID NO: 17501 - RNA, 23 nt, artificial
  Oligomer
ggccuccuuagaucccuaagaug

SEQ ID NO: 17502 - RNA, 23 nt, artificial
  Oligomer
gggccuccuuagaucccuaagau

SEQ ID NO: 17503 - RNA, 23 nt, artificial
  Oligomer
agggccuccuuagaucccuaaga

SEQ ID NO: 17504 - RNA, 23 nt, artificial
  Oligomer
uagggccuccuuagaucccuaag

SEQ ID NO: 17505 - RNA, 23 nt, artificial
  Oligomer
auagggccuccuuagaucccuaa

SEQ ID NO: 17506 - RNA, 23 nt, artificial
  Oligomer
aaugagaucguuguuuacagugu

SEQ ID NO: 17507 - RNA, 23 nt, artificial
  Oligomer
aaaugagaucguuguuuacagug

SEQ ID NO: 17508 - RNA, 23 nt, artificial
  Oligomer
aaaaugagaucguuguuuacagu

SEQ ID NO: 17509 - RNA, 23 nt, artificial
  Oligomer
cauuguguucucuauugcugcuc

SEQ ID NO: 17510 - RNA, 23 nt, artificial
  Oligomer
ucauuguguucucuauugcugcu

SEQ ID NO: 17511 - RNA, 23 nt, artificial
  Oligomer
uucauuguguucucuauugcugc

SEQ ID NO: 17512 - RNA, 23 nt, artificial
  Oligomer
uuucauuguguucucuauugcug

SEQ ID NO: 17513 - RNA, 23 nt, artificial
  Oligomer
uuuucauuguguucucuauugcu

SEQ ID NO: 17514 - RNA, 23 nt, artificial
  Oligomer
gacuaucugauuuccuaauguca

SEQ ID NO: 17515 - RNA, 23 nt, artificial
  Oligomer
gcacagaaguagcucuggugacc

SEQ ID NO: 17516 - RNA, 23 nt, artificial
  Oligomer
ggcacagaaguagcucuggugac

SEQ ID NO: 17517 - RNA, 23 nt, artificial
  Oligomer
gggcacagaaguagcucugguga

SEQ ID NO: 17518 - RNA, 23 nt, artificial
  Oligomer
ugggcacagaaguagcucuggug

SEQ ID NO: 17519 - RNA, 23 nt, artificial
  Oligomer
gugggcacagaaguagcucuggu

SEQ ID NO: 17520 - RNA, 23 nt, artificial
  Oligomer
aucagaccuucaacuggaauaca

SEQ ID NO: 17521 - RNA, 23 nt, artificial
  Oligomer
aaucagaccuucaacuggaauac

SEQ ID NO: 17522 - RNA, 23 nt, artificial
  Oligomer
gaaucagaccuucaacuggaaua

SEQ ID NO: 17523 - RNA, 23 nt, artificial
  Oligomer
ugaaucagaccuucaacuggaau

SEQ ID NO: 17524 - RNA, 23 nt, artificial
  Oligomer
gugaaucagaccuucaacuggaa

SEQ ID NO: 17525 - RNA, 23 nt, artificial
  Oligomer
gaauuaaaugccaucaacacaac

SEQ ID NO: 17526 - RNA, 23 nt, artificial
  Oligomer
ugagcaauuggauugucaucagc

SEQ ID NO: 17527 - RNA, 23 nt, artificial
  Oligomer
gugagcaauuggauugucaucag

SEQ ID NO: 17528 - RNA, 23 nt, artificial
  Oligomer
cgugagcaauuggauugucauca

SEQ ID NO: 17529 - RNA, 23 nt, artificial
  Oligomer
acgugagcaauuggauugucauc

SEQ ID NO: 17530 - RNA, 23 nt, artificial
  Oligomer
uacgugagcaauuggauugucau

SEQ ID NO: 17531 - RNA, 23 nt, artificial
  Oligomer
uaauuccuguauucuacagcaga

SEQ ID NO: 17532 - RNA, 23 nt, artificial
  Oligomer
cauuuaguaacaguugugaugac

SEQ ID NO: 17533 - RNA, 23 nt, artificial
  Oligomer
ccauuuaguaacaguugugauga

SEQ ID NO: 17534 - RNA, 23 nt, artificial
  Oligomer
uccauuuaguaacaguugugaug

SEQ ID NO: 17535 - RNA, 23 nt, artificial
  Oligomer
uuccauuuaguaacaguugugau

SEQ ID NO: 17536 - RNA, 23 nt, artificial
  Oligomer
uuuccauuuaguaacaguuguga

SEQ ID NO: 17537 - RNA, 23 nt, artificial
  Oligomer
aguguagggcagagaggucuaac

SEQ ID NO: 17538 - RNA, 23 nt, artificial
  Oligomer
caguguagggcagagaggucuaa

SEQ ID NO: 17539 - RNA, 23 nt, artificial
  Oligomer
ggauuuaaagccuuuagagccag

SEQ ID NO: 17540 - RNA, 23 nt, artificial
  Oligomer
cauagccaacugcuguucauguu

SEQ ID NO: 17541 - RNA, 23 nt, artificial
  Oligomer
agaauucugcauuucaaaacacc

SEQ ID NO: 17542 - RNA, 23 nt, artificial
  Oligomer
gaauucugcauuucaaaacaccu

SEQ ID NO: 17543 - RNA, 23 nt, artificial
  Oligomer
aauucugcauuucaaaacaccuu

SEQ ID NO: 17544 - RNA, 23 nt, artificial
  Oligomer
auucugcauuucaaaacaccuug

SEQ ID NO: 17545 - RNA, 23 nt, artificial
  Oligomer
uucugcauuucaaaacaccuuga

SEQ ID NO: 17546 - RNA, 23 nt, artificial
  Oligomer
gaaauuaguuuuggauaguucuc

SEQ ID NO: 17547 - RNA, 23 nt, artificial
  Oligomer
aaauuaguuuuggauaguucucc

SEQ ID NO: 17548 - RNA, 23 nt, artificial
  Oligomer
aauuaguuuuggauaguucuccu

SEQ ID NO: 17549 - RNA, 23 nt, artificial
  Oligomer
auuaguuuuggauaguucuccuu

SEQ ID NO: 17550 - RNA, 23 nt, artificial
  Oligomer
uuaguuuuggauaguucuccuuu

SEQ ID NO: 17551 - RNA, 23 nt, artificial
  Oligomer
ccuuuauaauucgggucaccucc

SEQ ID NO: 17552 - RNA, 23 nt, artificial
  Oligomer
cuuuauaauucgggucaccuccc

SEQ ID NO: 17553 - RNA, 23 nt, artificial
  Oligomer
uuuauaauucgggucaccucccu

SEQ ID NO: 17554 - RNA, 23 nt, artificial
  Oligomer
uuauaauucgggucaccucccug

SEQ ID NO: 17555 - RNA, 23 nt, artificial
  Oligomer
uauaauucgggucaccucccugg

SEQ ID NO: 17556 - RNA, 23 nt, artificial
  Oligomer
cagcuuaaguugcguccacuucu

SEQ ID NO: 17557 - RNA, 23 nt, artificial
  Oligomer
agcuuaaguugcguccacuucug

SEQ ID NO: 17558 - RNA, 23 nt, artificial
  Oligomer
gcuuaaguugcguccacuucugg

SEQ ID NO: 17559 - RNA, 23 nt, artificial
  Oligomer
cuuaaguugcguccacuucuggu

SEQ ID NO: 17560 - RNA, 23 nt, artificial
  Oligomer
uuaaguugcguccacuucugguc

SEQ ID NO: 17561 - RNA, 23 nt, artificial
  Oligomer
ucugcauuucaaaacaccuugau

SEQ ID NO: 17562 - RNA, 23 nt, artificial
  Oligomer
cugcauuucaaaacaccuugauc

SEQ ID NO: 17563 - RNA, 23 nt, artificial
  Oligomer
ugcauuucaaaacaccuugauca

SEQ ID NO: 17564 - RNA, 23 nt, artificial
  Oligomer
acacuuucccuucucaaucucuc

SEQ ID NO: 17565 - RNA, 23 nt, artificial
  Oligomer
cacuuucccuucucaaucucuca

SEQ ID NO: 17566 - RNA, 23 nt, artificial
  Oligomer
acuuucccuucucaaucucucau

SEQ ID NO: 17567 - RNA, 23 nt, artificial
  Oligomer
cuuucccuucucaaucucucauu

SEQ ID NO: 17568 - RNA, 23 nt, artificial
  Oligomer
uuucccuucucaaucucucauuc

SEQ ID NO: 17569 - RNA, 23 nt, artificial
  Oligomer
agauuaucaguccaauaugaacc

SEQ ID NO: 17570 - RNA, 23 nt, artificial
  Oligomer
gauuaucaguccaauaugaacca

SEQ ID NO: 17571 - RNA, 23 nt, artificial
  Oligomer
auuaucaguccaauaugaaccag

SEQ ID NO: 17572 - RNA, 23 nt, artificial
  Oligomer
uuaucaguccaauaugaaccagu

SEQ ID NO: 17573 - RNA, 23 nt, artificial
  Oligomer
uaucaguccaauaugaaccaguu

SEQ ID NO: 17574 - RNA, 23 nt, artificial
  Oligomer
accauauuccucuagacacuucc

SEQ ID NO: 17575 - RNA, 23 nt, artificial
  Oligomer
ccauauuccucuagacacuuccu

SEQ ID NO: 17576 - RNA, 23 nt, artificial
  Oligomer
cauauuccucuagacacuuccug

SEQ ID NO: 17577 - RNA, 23 nt, artificial
  Oligomer
auauuccucuagacacuuccugc

SEQ ID NO: 17578 - RNA, 23 nt, artificial
  Oligomer
uauuccucuagacacuuccugca

SEQ ID NO: 17579 - RNA, 23 nt, artificial
  Oligomer
auaguucuccuuucugcuguacc

SEQ ID NO: 17580 - RNA, 23 nt, artificial
  Oligomer
uaguucuccuuucugcuguaccu

SEQ ID NO: 17581 - RNA, 23 nt, artificial
  Oligomer
aguucuccuuucugcuguaccuc

SEQ ID NO: 17582 - RNA, 23 nt, artificial
  Oligomer
guucuccuuucugcuguaccuca

SEQ ID NO: 17583 - RNA, 23 nt, artificial
  Oligomer
uucuccuuucugcuguaccucau

SEQ ID NO: 17584 - RNA, 23 nt, artificial
  Oligomer
cuacuucugugcccaccauauuc

SEQ ID NO: 17585 - RNA, 23 nt, artificial
  Oligomer
uacuucugugcccaccauauucc

SEQ ID NO: 17586 - RNA, 23 nt, artificial
  Oligomer
acuucugugcccaccauauuccu

SEQ ID NO: 17587 - RNA, 23 nt, artificial
  Oligomer
cuucugugcccaccauauuccuc

SEQ ID NO: 17588 - RNA, 23 nt, artificial
  Oligomer
uucugugcccaccauauuccucu

SEQ ID NO: 17589 - RNA, 23 nt, artificial
  Oligomer
gacauuugaagauagcuuacugc

SEQ ID NO: 17590 - RNA, 23 nt, artificial
  Oligomer
acauuugaagauagcuuacugcu

SEQ ID NO: 17591 - RNA, 23 nt, artificial
  Oligomer
cauuugaagauagcuuacugcuu

SEQ ID NO: 17592 - RNA, 23 nt, artificial
  Oligomer
auuugaagauagcuuacugcuua

SEQ ID NO: 17593 - RNA, 23 nt, artificial
  Oligomer
uuugaagauagcuuacugcuuag

SEQ ID NO: 17594 - RNA, 23 nt, artificial
  Oligomer
cauauugaaauccaguuugcugc

SEQ ID NO: 17595 - RNA, 23 nt, artificial
  Oligomer
auauugaaauccaguuugcugcu

SEQ ID NO: 17596 - RNA, 23 nt, artificial
  Oligomer
uauugaaauccaguuugcugcua

SEQ ID NO: 17597 - RNA, 23 nt, artificial
  Oligomer
auugaaauccaguuugcugcuaa

SEQ ID NO: 17598 - RNA, 23 nt, artificial
  Oligomer
uugaaauccaguuugcugcuaac

SEQ ID NO: 17599 - RNA, 23 nt, artificial
  Oligomer
acgguucaacuuuguuucuuccc

SEQ ID NO: 17600 - RNA, 23 nt, artificial
  Oligomer
cgguucaacuuuguuucuucccu

SEQ ID NO: 17601 - RNA, 23 nt, artificial
  Oligomer
gguucaacuuuguuucuucccuu

SEQ ID NO: 17602 - RNA, 23 nt, artificial
  Oligomer
guucaacuuuguuucuucccuua

SEQ ID NO: 17603 - RNA, 23 nt, artificial
  Oligomer
uucaacuuuguuucuucccuuag

SEQ ID NO: 17604 - RNA, 23 nt, artificial
  Oligomer
uguuucuucccuuaguauugcug

SEQ ID NO: 17605 - RNA, 23 nt, artificial
  Oligomer
guuucuucccuuaguauugcuga

SEQ ID NO: 17606 - RNA, 23 nt, artificial
  Oligomer
uuucuucccuuaguauugcugac

SEQ ID NO: 17607 - RNA, 23 nt, artificial
  Oligomer
uucuucccuuaguauugcugaca

SEQ ID NO: 17608 - RNA, 23 nt, artificial
  Oligomer
ucuucccuuaguauugcugacaa

SEQ ID NO: 17609 - RNA, 23 nt, artificial
  Oligomer
agaauauaguuuuacacaggagc

SEQ ID NO: 17610 - RNA, 23 nt, artificial
  Oligomer
gaauauaguuuuacacaggagca

SEQ ID NO: 17611 - RNA, 23 nt, artificial
  Oligomer
aauauaguuuuacacaggagcaa

SEQ ID NO: 17612 - RNA, 23 nt, artificial
  Oligomer
auauaguuuuacacaggagcaag

SEQ ID NO: 17613 - RNA, 23 nt, artificial
  Oligomer
uauaguuuuacacaggagcaagg

SEQ ID NO: 17614 - RNA, 23 nt, artificial
  Oligomer
auccuuugauuucaggguaagac

SEQ ID NO: 17615 - RNA, 23 nt, artificial
  Oligomer
uccuuugauuucaggguaagacu

SEQ ID NO: 17616 - RNA, 23 nt, artificial
  Oligomer
ccuuugauuucaggguaagacuc

SEQ ID NO: 17617 - RNA, 23 nt, artificial
  Oligomer
cuuugauuucaggguaagacucc

SEQ ID NO: 17618 - RNA, 23 nt, artificial
  Oligomer
uuugauuucaggguaagacucca

SEQ ID NO: 17619 - RNA, 23 nt, artificial
  Oligomer
cauuuaauucuucuccauuuucc

SEQ ID NO: 17620 - RNA, 23 nt, artificial
  Oligomer
auuuaauucuucuccauuuucca

SEQ ID NO: 17621 - RNA, 23 nt, artificial
  Oligomer
uuuaauucuucuccauuuuccaa

SEQ ID NO: 17622 - RNA, 23 nt, artificial
  Oligomer
uuaauucuucuccauuuuccaac

SEQ ID NO: 17623 - RNA, 23 nt, artificial
  Oligomer
uaauucuucuccauuuuccaacc

SEQ ID NO: 17624 - RNA, 23 nt, artificial
  Oligomer
cacuuuuucuuuggguaaucuuc

SEQ ID NO: 17625 - RNA, 23 nt, artificial
  Oligomer
acuuuuucuuuggguaaucuuca

SEQ ID NO: 17626 - RNA, 23 nt, artificial
  Oligomer
cuuuuucuuuggguaaucuucag

SEQ ID NO: 17627 - RNA, 23 nt, artificial
  Oligomer
uuuuucuuuggguaaucuucaga

SEQ ID NO: 17628 - RNA, 23 nt, artificial
  Oligomer
uuuucuuuggguaaucuucagag

SEQ ID NO: 17629 - RNA, 23 nt, artificial
  Oligomer
cuucuuucacuuccuuggucacg

SEQ ID NO: 17630 - RNA, 23 nt, artificial
  Oligomer
uucuuucacuuccuuggucacgu

SEQ ID NO: 17631 - RNA, 23 nt, artificial
  Oligomer
ucuuucacuuccuuggucacgug

SEQ ID NO: 17632 - RNA, 23 nt, artificial
  Oligomer
cuuucacuuccuuggucacgugg

SEQ ID NO: 17633 - RNA, 23 nt, artificial
  Oligomer
uuucacuuccuuggucacgugga

SEQ ID NO: 17634 - RNA, 23 nt, artificial
  Oligomer
gcauuucaaaacaccuugaucaa

SEQ ID NO: 17635 - RNA, 23 nt, artificial
  Oligomer
cauuucaaaacaccuugaucaag

SEQ ID NO: 17636 - RNA, 23 nt, artificial
  Oligomer
auuucaaaacaccuugaucaagg

SEQ ID NO: 17637 - RNA, 23 nt, artificial
  Oligomer
uuucaaaacaccuugaucaaggu

SEQ ID NO: 17638 - RNA, 23 nt, artificial
  Oligomer
auuccucuagacacuuccugcaa

SEQ ID NO: 17639 - RNA, 23 nt, artificial
  Oligomer
uuccucuagacacuuccugcaaa

SEQ ID NO: 17640 - RNA, 23 nt, artificial
  Oligomer
uauguugguguuagaccucucug

SEQ ID NO: 17641 - RNA, 23 nt, artificial
  Oligomer
auguugguguuagaccucucugc

SEQ ID NO: 17642 - RNA, 23 nt, artificial
  Oligomer
uguugguguuagaccucucugcc

SEQ ID NO: 17643 - RNA, 23 nt, artificial
  Oligomer
guugguguuagaccucucugccc

SEQ ID NO: 17644 - RNA, 23 nt, artificial
  Oligomer
uugguguuagaccucucugcccu

SEQ ID NO: 17645 - RNA, 23 nt, artificial
  Oligomer
aaucucucauuccuccuucucuc

SEQ ID NO: 17646 - RNA, 23 nt, artificial
  Oligomer
aucucucauuccuccuucucucu

SEQ ID NO: 17647 - RNA, 23 nt, artificial
  Oligomer
ucucucauuccuccuucucucuc

SEQ ID NO: 17648 - RNA, 23 nt, artificial
  Oligomer
cucucauuccuccuucucucucu

SEQ ID NO: 17649 - RNA, 23 nt, artificial
  Oligomer
ucucauuccuccuucucucucug

SEQ ID NO: 17650 - RNA, 23 nt, artificial
  Oligomer
cuccuucucucucugcaucuugg

SEQ ID NO: 17651 - RNA, 23 nt, artificial
  Oligomer
uccuucucucucugcaucuuggg

SEQ ID NO: 17652 - RNA, 23 nt, artificial
  Oligomer
ccuucucucucugcaucuugggg

SEQ ID NO: 17653 - RNA, 23 nt, artificial
  Oligomer
cuucucucucugcaucuuggggc

SEQ ID NO: 17654 - RNA, 23 nt, artificial
  Oligomer
uucucucucugcaucuuggggca

SEQ ID NO: 17655 - RNA, 23 nt, artificial
  Oligomer
cucuuaaauguccauacuugaug

SEQ ID NO: 17656 - RNA, 23 nt, artificial
  Oligomer
ucuuaaauguccauacuugauga

SEQ ID NO: 17657 - RNA, 23 nt, artificial
  Oligomer
cuuaaauguccauacuugaugag

SEQ ID NO: 17658 - RNA, 23 nt, artificial
  Oligomer
uuaaauguccauacuugaugaga

SEQ ID NO: 17659 - RNA, 23 nt, artificial
  Oligomer
uaaauguccauacuugaugagac

SEQ ID NO: 17660 - RNA, 23 nt, artificial
  Oligomer
uugauggcauuuaauucuucucc

SEQ ID NO: 17661 - RNA, 23 nt, artificial
  Oligomer
ugauggcauuuaauucuucucca

SEQ ID NO: 17662 - RNA, 23 nt, artificial
  Oligomer
gauggcauuuaauucuucuccau

SEQ ID NO: 17663 - RNA, 23 nt, artificial
  Oligomer
auggcauuuaauucuucuccauu

SEQ ID NO: 17664 - RNA, 23 nt, artificial
  Oligomer
uggcauuuaauucuucuccauuu

SEQ ID NO: 17665 - RNA, 23 nt, artificial
  Oligomer
aauucuucuccauuuuccaacca

SEQ ID NO: 17666 - RNA, 23 nt, artificial
  Oligomer
auucuucuccauuuuccaaccag

SEQ ID NO: 17667 - RNA, 23 nt, artificial
  Oligomer
uucuucuccauuuuccaaccagg

SEQ ID NO: 17668 - RNA, 23 nt, artificial
  Oligomer
accauuuucuucuccuuuugcca

SEQ ID NO: 17669 - RNA, 23 nt, artificial
  Oligomer
ccauuuucuucuccuuuugccag

SEQ ID NO: 17670 - RNA, 23 nt, artificial
  Oligomer
cauuuucuucuccuuuugccagu

SEQ ID NO: 17671 - RNA, 23 nt, artificial
  Oligomer
auuuucuucuccuuuugccagua

SEQ ID NO: 17672 - RNA, 23 nt, artificial
  Oligomer
uuuucuucuccuuuugccaguag

SEQ ID NO: 17673 - RNA, 23 nt, artificial
  Oligomer
aaagauguucaugccauacuucc

SEQ ID NO: 17674 - RNA, 23 nt, artificial
  Oligomer
aagauguucaugccauacuuccu

SEQ ID NO: 17675 - RNA, 23 nt, artificial
  Oligomer
agauguucaugccauacuuccua

SEQ ID NO: 17676 - RNA, 23 nt, artificial
  Oligomer
gauguucaugccauacuuccuau

SEQ ID NO: 17677 - RNA, 23 nt, artificial
  Oligomer
auguucaugccauacuuccuaug

SEQ ID NO: 17678 - RNA, 23 nt, artificial
  Oligomer
guuauuagugauaucaaagaugg

SEQ ID NO: 17679 - RNA, 23 nt, artificial
  Oligomer
uuauuagugauaucaaagauggu

SEQ ID NO: 17680 - RNA, 23 nt, artificial
  Oligomer
uauuagugauaucaaagaugguc

SEQ ID NO: 17681 - RNA, 23 nt, artificial
  Oligomer
auuagugauaucaaagauggucc

SEQ ID NO: 17682 - RNA, 23 nt, artificial
  Oligomer
uuagugauaucaaagaugguccg

SEQ ID NO: 17683 - RNA, 23 nt, artificial
  Oligomer
uuucuucuccuuuugccaguaga

SEQ ID NO: 17684 - RNA, 23 nt, artificial
  Oligomer
cuucuccuuuugccaguagaugc

SEQ ID NO: 17685 - RNA, 23 nt, artificial
  Oligomer
uucuccuuuugccaguagaugcg

SEQ ID NO: 17686 - RNA, 23 nt, artificial
  Oligomer
ucuccuuuugccaguagaugcga

SEQ ID NO: 17687 - RNA, 23 nt, artificial
  Oligomer
cuccuuuugccaguagaugcgag

SEQ ID NO: 17688 - RNA, 23 nt, artificial
  Oligomer
uccuuuugccaguagaugcgagu

SEQ ID NO: 17689 - RNA, 23 nt, artificial
  Oligomer
gucuucuuuugcuguucaacucc

SEQ ID NO: 17690 - RNA, 23 nt, artificial
  Oligomer
ucuucuuuugcuguucaacucca

SEQ ID NO: 17691 - RNA, 23 nt, artificial
  Oligomer
cuucuuuugcuguucaacuccag

SEQ ID NO: 17692 - RNA, 23 nt, artificial
  Oligomer
uucuuuugcuguucaacuccaga

SEQ ID NO: 17693 - RNA, 23 nt, artificial
  Oligomer
ucuuuugcuguucaacuccagau

SEQ ID NO: 17694 - RNA, 23 nt, artificial
  Oligomer
acauuaggaaaucagauagucuc

SEQ ID NO: 17695 - RNA, 23 nt, artificial
  Oligomer
cauuaggaaaucagauagucucu

SEQ ID NO: 17696 - RNA, 23 nt, artificial
  Oligomer
auuaggaaaucagauagucucug

SEQ ID NO: 17697 - RNA, 23 nt, artificial
  Oligomer
uuaggaaaucagauagucucuga

SEQ ID NO: 17698 - RNA, 23 nt, artificial
  Oligomer
uaggaaaucagauagucucugaa

SEQ ID NO: 17699 - RNA, 23 nt, artificial
  Oligomer
caaauucuacuuccagcagcacu

SEQ ID NO: 17700 - RNA, 23 nt, artificial
  Oligomer
aaauucuacuuccagcagcacuu

SEQ ID NO: 17701 - RNA, 23 nt, artificial
  Oligomer
aauucuacuuccagcagcacuuu

SEQ ID NO: 17702 - RNA, 23 nt, artificial
  Oligomer
auucuacuuccagcagcacuuug

SEQ ID NO: 17703 - RNA, 23 nt, artificial
  Oligomer
uucuacuuccagcagcacuuugc

SEQ ID NO: 17704 - RNA, 23 nt, artificial
  Oligomer
ucugugcccaccauauuccucua

SEQ ID NO: 17705 - RNA, 23 nt, artificial
  Oligomer
acuguuauacagggcguacacuu

SEQ ID NO: 17706 - RNA, 23 nt, artificial
  Oligomer
cuguuauacagggcguacacuuu

SEQ ID NO: 17707 - RNA, 23 nt, artificial
  Oligomer
uguuauacagggcguacacuuuc

SEQ ID NO: 17708 - RNA, 23 nt, artificial
  Oligomer
guuauacagggcguacacuuucc

SEQ ID NO: 17709 - RNA, 23 nt, artificial
  Oligomer
uuauacagggcguacacuuuccc

SEQ ID NO: 17710 - RNA, 23 nt, artificial
  Oligomer
uuucuuuggguaaucuucagaga

SEQ ID NO: 17711 - RNA, 23 nt, artificial
  Oligomer
aggcuuuaaaucccagccaugug

SEQ ID NO: 17712 - RNA, 23 nt, artificial
  Oligomer
ggcuuuaaaucccagccaugugg

SEQ ID NO: 17713 - RNA, 23 nt, artificial
  Oligomer
gcuuuaaaucccagccauguggc

SEQ ID NO: 17714 - RNA, 23 nt, artificial
  Oligomer
cuuuaaaucccagccauguggcu

SEQ ID NO: 17715 - RNA, 23 nt, artificial
  Oligomer
uuuaaaucccagccauguggcuu

SEQ ID NO: 17716 - RNA, 23 nt, artificial
  Oligomer
gccuuuauaauucgggucaccuc

SEQ ID NO: 17717 - RNA, 23 nt, artificial
  Oligomer
gccuuugucauuaauaacacugg

SEQ ID NO: 17718 - RNA, 23 nt, artificial
  Oligomer
ccuuugucauuaauaacacuggu

SEQ ID NO: 17719 - RNA, 23 nt, artificial
  Oligomer
cuuugucauuaauaacacuggua

SEQ ID NO: 17720 - RNA, 23 nt, artificial
  Oligomer
uuugucauuaauaacacugguau

SEQ ID NO: 17721 - RNA, 23 nt, artificial
  Oligomer
uugucauuaauaacacugguauu

SEQ ID NO: 17722 - RNA, 23 nt, artificial
  Oligomer
cccuucucaaucucucauuccuc

SEQ ID NO: 17723 - RNA, 23 nt, artificial
  Oligomer
ccuucucaaucucucauuccucc

SEQ ID NO: 17724 - RNA, 23 nt, artificial
  Oligomer
cuucucaaucucucauuccuccu

SEQ ID NO: 17725 - RNA, 23 nt, artificial
  Oligomer
uucucaaucucucauuccuccuu

SEQ ID NO: 17726 - RNA, 23 nt, artificial
  Oligomer
ucucaaucucucauuccuccuuc

SEQ ID NO: 17727 - RNA, 23 nt, artificial
  Oligomer
agagcucaguuucaggaucuugg

SEQ ID NO: 17728 - RNA, 23 nt, artificial
  Oligomer
gagcucaguuucaggaucuuggg

SEQ ID NO: 17729 - RNA, 23 nt, artificial
  Oligomer
agcucaguuucaggaucuuggga

SEQ ID NO: 17730 - RNA, 23 nt, artificial
  Oligomer
gcucaguuucaggaucuugggaa

SEQ ID NO: 17731 - RNA, 23 nt, artificial
  Oligomer
cucaguuucaggaucuugggaaa

SEQ ID NO: 17732 - RNA, 23 nt, artificial
  Oligomer
caccauuuucuucuccuuuugcc

SEQ ID NO: 17733 - RNA, 23 nt, artificial
  Oligomer
aguuuuacacaggagcaagguuu

SEQ ID NO: 17734 - RNA, 23 nt, artificial
  Oligomer
guuuuacacaggagcaagguuug

SEQ ID NO: 17735 - RNA, 23 nt, artificial
  Oligomer
uuuuacacaggagcaagguuugu

SEQ ID NO: 17736 - RNA, 23 nt, artificial
  Oligomer
uuuacacaggagcaagguuugug

SEQ ID NO: 17737 - RNA, 23 nt, artificial
  Oligomer
uuacacaggagcaagguuuguga

SEQ ID NO: 17738 - RNA, 23 nt, artificial
  Oligomer
cuccuugacuacugcuuugacgu

SEQ ID NO: 17739 - RNA, 23 nt, artificial
  Oligomer
uccuugacuacugcuuugacgua

SEQ ID NO: 17740 - RNA, 23 nt, artificial
  Oligomer
ccuugacuacugcuuugacguac

SEQ ID NO: 17741 - RNA, 23 nt, artificial
  Oligomer
cuugacuacugcuuugacguacc

SEQ ID NO: 17742 - RNA, 23 nt, artificial
  Oligomer
uugacuacugcuuugacguaccu

SEQ ID NO: 17743 - RNA, 23 nt, artificial
  Oligomer
gcacuuugccugacauauauaug

SEQ ID NO: 17744 - RNA, 23 nt, artificial
  Oligomer
cacuuugccugacauauauaugu

SEQ ID NO: 17745 - RNA, 23 nt, artificial
  Oligomer
acuuugccugacauauauaugua

SEQ ID NO: 17746 - RNA, 23 nt, artificial
  Oligomer
cuuugccugacauauauauguau

SEQ ID NO: 17747 - RNA, 23 nt, artificial
  Oligomer
uuugccugacauauauauguaua

SEQ ID NO: 17748 - RNA, 23 nt, artificial
  Oligomer
augcucuugcuugguuguauucc

SEQ ID NO: 17749 - RNA, 23 nt, artificial
  Oligomer
ugcucuugcuugguuguauucca

SEQ ID NO: 17750 - RNA, 23 nt, artificial
  Oligomer
gcucuugcuugguuguauuccag

SEQ ID NO: 17751 - RNA, 23 nt, artificial
  Oligomer
cucuugcuugguuguauuccagu

SEQ ID NO: 17752 - RNA, 23 nt, artificial
  Oligomer
ucuugcuugguuguauuccaguu

SEQ ID NO: 17753 - RNA, 23 nt, artificial
  Oligomer
ccaguuugcugcuaacagcauag

SEQ ID NO: 17754 - RNA, 23 nt, artificial
  Oligomer
caguuugcugcuaacagcauaga

SEQ ID NO: 17755 - RNA, 23 nt, artificial
  Oligomer
aguuugcugcuaacagcauagag

SEQ ID NO: 17756 - RNA, 23 nt, artificial
  Oligomer
guuugcugcuaacagcauagagc

SEQ ID NO: 17757 - RNA, 23 nt, artificial
  Oligomer
uuugcugcuaacagcauagagcu

SEQ ID NO: 17758 - RNA, 23 nt, artificial
  Oligomer
gcguugccacuucuuucacuucc

SEQ ID NO: 17759 - RNA, 23 nt, artificial
  Oligomer
cguugccacuucuuucacuuccu

SEQ ID NO: 17760 - RNA, 23 nt, artificial
  Oligomer
guugccacuucuuucacuuccuu

SEQ ID NO: 17761 - RNA, 23 nt, artificial
  Oligomer
uugccacuucuuucacuuccuug

SEQ ID NO: 17762 - RNA, 23 nt, artificial
  Oligomer
ugccacuucuuucacuuccuugg

SEQ ID NO: 17763 - RNA, 23 nt, artificial
  Oligomer
uucacuuccuuggucacguggau

SEQ ID NO: 17764 - RNA, 23 nt, artificial
  Oligomer
uuauuaaagaaacgguucaacuu

SEQ ID NO: 17765 - RNA, 23 nt, artificial
  Oligomer
uauuaaagaaacgguucaacuuu

SEQ ID NO: 17766 - RNA, 23 nt, artificial
  Oligomer
auuaaagaaacgguucaacuuug

SEQ ID NO: 17767 - RNA, 23 nt, artificial
  Oligomer
uuaaagaaacgguucaacuuugu

SEQ ID NO: 17768 - RNA, 23 nt, artificial
  Oligomer
uacauacacuguaaacaacgauc

SEQ ID NO: 17769 - RNA, 23 nt, artificial
  Oligomer
acauacacuguaaacaacgaucu

SEQ ID NO: 17770 - RNA, 23 nt, artificial
  Oligomer
cauacacuguaaacaacgaucuc

SEQ ID NO: 17771 - RNA, 23 nt, artificial
  Oligomer
auacacuguaaacaacgaucuca

SEQ ID NO: 17772 - RNA, 23 nt, artificial
  Oligomer
uacacuguaaacaacgaucucau

SEQ ID NO: 17773 - RNA, 23 nt, artificial
  Oligomer
gucuuuggacuaucccuuuccuc

SEQ ID NO: 17774 - RNA, 23 nt, artificial
  Oligomer
ucuuuggacuaucccuuuccucc

SEQ ID NO: 17775 - RNA, 23 nt, artificial
  Oligomer
cuuuggacuaucccuuuccuccu

SEQ ID NO: 17776 - RNA, 23 nt, artificial
  Oligomer
uuuggacuaucccuuuccuccuu

SEQ ID NO: 17777 - RNA, 23 nt, artificial
  Oligomer
uuggacuaucccuuuccuccuug

SEQ ID NO: 17778 - RNA, 23 nt, artificial
  Oligomer
uaguuuuggauaguucuccuuuc

SEQ ID NO: 17779 - RNA, 23 nt, artificial
  Oligomer
aguuuuggauaguucuccuuucu

SEQ ID NO: 17780 - RNA, 23 nt, artificial
  Oligomer
guuuuggauaguucuccuuucug

SEQ ID NO: 17781 - RNA, 23 nt, artificial
  Oligomer
uuuuggauaguucuccuuucugc

SEQ ID NO: 17782 - RNA, 23 nt, artificial
  Oligomer
uuuggauaguucuccuuucugcu

SEQ ID NO: 17783 - RNA, 23 nt, artificial
  Oligomer
caauaauauuuccauuagucucc

SEQ ID NO: 17784 - RNA, 23 nt, artificial
  Oligomer
aauaauauuuccauuagucuccu

SEQ ID NO: 17785 - RNA, 23 nt, artificial
  Oligomer
auaauauuuccauuagucuccua

SEQ ID NO: 17786 - RNA, 23 nt, artificial
  Oligomer
uaauauuuccauuagucuccuaa

SEQ ID NO: 17787 - RNA, 23 nt, artificial
  Oligomer
aauauuuccauuagucuccuaaa

SEQ ID NO: 17788 - RNA, 23 nt, artificial
  Oligomer
ugguauucucuaaagucccuucc

SEQ ID NO: 17789 - RNA, 23 nt, artificial
  Oligomer
gguauucucuaaagucccuucca

SEQ ID NO: 17790 - RNA, 23 nt, artificial
  Oligomer
guauucucuaaagucccuuccag

SEQ ID NO: 17791 - RNA, 23 nt, artificial
  Oligomer
uauucucuaaagucccuuccaga

SEQ ID NO: 17792 - RNA, 23 nt, artificial
  Oligomer
auucucuaaagucccuuccagaa

SEQ ID NO: 17793 - RNA, 23 nt, artificial
  Oligomer
auacuucagaacaacacacucgu

SEQ ID NO: 17794 - RNA, 23 nt, artificial
  Oligomer
uacuucagaacaacacacucgua

SEQ ID NO: 17795 - RNA, 23 nt, artificial
  Oligomer
acuucagaacaacacacucguau

SEQ ID NO: 17796 - RNA, 23 nt, artificial
  Oligomer
cuucagaacaacacacucguaug

SEQ ID NO: 17797 - RNA, 23 nt, artificial
  Oligomer
uucagaacaacacacucguaugu

SEQ ID NO: 17798 - RNA, 23 nt, artificial
  Oligomer
ugucuucuuuugcuguucaacuc

SEQ ID NO: 17799 - RNA, 23 nt, artificial
  Oligomer
gcuguucaacuccagauuuucag

SEQ ID NO: 17800 - RNA, 23 nt, artificial
  Oligomer
cuguucaacuccagauuuucaga

SEQ ID NO: 17801 - RNA, 23 nt, artificial
  Oligomer
uguucaacuccagauuuucagau

SEQ ID NO: 17802 - RNA, 23 nt, artificial
  Oligomer
guucaacuccagauuuucagaug

SEQ ID NO: 17803 - RNA, 23 nt, artificial
  Oligomer
uucaacuccagauuuucagauga

SEQ ID NO: 17804 - RNA, 23 nt, artificial
  Oligomer
auauuuuacaaaugaggucaaac

SEQ ID NO: 17805 - RNA, 23 nt, artificial
  Oligomer
uauuuuacaaaugaggucaaacu

SEQ ID NO: 17806 - RNA, 23 nt, artificial
  Oligomer
auuuuacaaaugaggucaaacua

SEQ ID NO: 17807 - RNA, 23 nt, artificial
  Oligomer
uuuuacaaaugaggucaaacuag

SEQ ID NO: 17808 - RNA, 23 nt, artificial
  Oligomer
uuuacaaaugaggucaaacuagc

SEQ ID NO: 17809 - RNA, 23 nt, artificial
  Oligomer
uggacuaucccuuuccuccuuga

SEQ ID NO: 17810 - RNA, 23 nt, artificial
  Oligomer
uccucuagacacuuccugcaaag

SEQ ID NO: 17811 - RNA, 23 nt, artificial
  Oligomer
ugauuucaggguaagacuccacu

SEQ ID NO: 17812 - RNA, 23 nt, artificial
  Oligomer
gauuucaggguaagacuccacuu

SEQ ID NO: 17813 - RNA, 23 nt, artificial
  Oligomer
auuucaggguaagacuccacuuc

SEQ ID NO: 17814 - RNA, 23 nt, artificial
  Oligomer
uuucaggguaagacuccacuucu

SEQ ID NO: 17815 - RNA, 23 nt, artificial
  Oligomer
uucaggguaagacuccacuucug

SEQ ID NO: 17816 - RNA, 23 nt, artificial
  Oligomer
ggagcagguuaucaggaaaaugc

SEQ ID NO: 17817 - RNA, 23 nt, artificial
  Oligomer
gagcagguuaucaggaaaaugcu

SEQ ID NO: 17818 - RNA, 23 nt, artificial
  Oligomer
agcagguuaucaggaaaaugcuc

SEQ ID NO: 17819 - RNA, 23 nt, artificial
  Oligomer
gcagguuaucaggaaaaugcucu

SEQ ID NO: 17820 - RNA, 23 nt, artificial
  Oligomer
cagguuaucaggaaaaugcucuu

SEQ ID NO: 17821 - RNA, 23 nt, artificial
  Oligomer
caucauagucagcaccauuuucu

SEQ ID NO: 17822 - RNA, 23 nt, artificial
  Oligomer
aucauagucagcaccauuuucuu

SEQ ID NO: 17823 - RNA, 23 nt, artificial
  Oligomer
ucauagucagcaccauuuucuuc

SEQ ID NO: 17824 - RNA, 23 nt, artificial
  Oligomer
cauagucagcaccauuuucuucu

SEQ ID NO: 17825 - RNA, 23 nt, artificial
  Oligomer
auagucagcaccauuuucuucuc

SEQ ID NO: 17826 - RNA, 23 nt, artificial
  Oligomer
aggguuugaguucacucaguacu

SEQ ID NO: 17827 - RNA, 23 nt, artificial
  Oligomer
ggguuugaguucacucaguacuu

SEQ ID NO: 17828 - RNA, 23 nt, artificial
  Oligomer
gguuugaguucacucaguacuug

SEQ ID NO: 17829 - RNA, 23 nt, artificial
  Oligomer
guuugaguucacucaguacuugu

SEQ ID NO: 17830 - RNA, 23 nt, artificial
  Oligomer
uuugaguucacucaguacuuguc

SEQ ID NO: 17831 - RNA, 23 nt, artificial
  Oligomer
uuaaaucccagccauguggcuua

SEQ ID NO: 17832 - RNA, 23 nt, artificial
  Oligomer
uuacaaaugaggucaaacuagca

SEQ ID NO: 17833 - RNA, 23 nt, artificial
  Oligomer
ggccuuuauaauucgggucaccu

SEQ ID NO: 17834 - RNA, 23 nt, artificial
  Oligomer
gaagugaagaagcaccuaagagc

SEQ ID NO: 17835 - RNA, 23 nt, artificial
  Oligomer
aagugaagaagcaccuaagagca

SEQ ID NO: 17836 - RNA, 23 nt, artificial
  Oligomer
agugaagaagcaccuaagagcag

SEQ ID NO: 17837 - RNA, 23 nt, artificial
  Oligomer
gugaagaagcaccuaagagcaga

SEQ ID NO: 17838 - RNA, 23 nt, artificial
  Oligomer
ugaagaagcaccuaagagcagau

SEQ ID NO: 17839 - RNA, 23 nt, artificial
  Oligomer
cagauacguaaagggcaaggugg

SEQ ID NO: 17840 - RNA, 23 nt, artificial
  Oligomer
agauacguaaagggcaagguggg

SEQ ID NO: 17841 - RNA, 23 nt, artificial
  Oligomer
gauacguaaagggcaaggugggg

SEQ ID NO: 17842 - RNA, 23 nt, artificial
  Oligomer
auacguaaagggcaagguggggu

SEQ ID NO: 17843 - RNA, 23 nt, artificial
  Oligomer
uacguaaagggcaagguggggua

SEQ ID NO: 17844 - RNA, 23 nt, artificial
  Oligomer
aaggucugauucacucuuaaaug

SEQ ID NO: 17845 - RNA, 23 nt, artificial
  Oligomer
aggucugauucacucuuaaaugu

SEQ ID NO: 17846 - RNA, 23 nt, artificial
  Oligomer
ggucugauucacucuuaaauguc

SEQ ID NO: 17847 - RNA, 23 nt, artificial
  Oligomer
gucugauucacucuuaaaugucc

SEQ ID NO: 17848 - RNA, 23 nt, artificial
  Oligomer
ucugauucacucuuaaaugucca

SEQ ID NO: 17849 - RNA, 23 nt, artificial
  Oligomer
augcuuagggucaaaagugaaag

SEQ ID NO: 17850 - RNA, 23 nt, artificial
  Oligomer
ugcuuagggucaaaagugaaagc

SEQ ID NO: 17851 - RNA, 23 nt, artificial
  Oligomer
gcuuagggucaaaagugaaagcc

SEQ ID NO: 17852 - RNA, 23 nt, artificial
  Oligomer
cuuagggucaaaagugaaagcca

SEQ ID NO: 17853 - RNA, 23 nt, artificial
  Oligomer
uuagggucaaaagugaaagccaa

SEQ ID NO: 17854 - RNA, 23 nt, artificial
  Oligomer
ccaauugcucacguagaagaccc

SEQ ID NO: 17855 - RNA, 23 nt, artificial
  Oligomer
caauugcucacguagaagacccu

SEQ ID NO: 17856 - RNA, 23 nt, artificial
  Oligomer
aauugcucacguagaagacccuc

SEQ ID NO: 17857 - RNA, 23 nt, artificial
  Oligomer
auugcucacguagaagacccucc

SEQ ID NO: 17858 - RNA, 23 nt, artificial
  Oligomer
uugcucacguagaagacccucca

SEQ ID NO: 17859 - RNA, 23 nt, artificial
  Oligomer
aauuauugaguuaaguauuccug

SEQ ID NO: 17860 - RNA, 23 nt, artificial
  Oligomer
auuauugaguuaaguauuccugu

SEQ ID NO: 17861 - RNA, 23 nt, artificial
  Oligomer
uuauugaguuaaguauuccuguc

SEQ ID NO: 17862 - RNA, 23 nt, artificial
  Oligomer
uauugaguuaaguauuccuguca

SEQ ID NO: 17863 - RNA, 23 nt, artificial
  Oligomer
auugaguuaaguauuccugucaa

SEQ ID NO: 17864 - RNA, 23 nt, artificial
  Oligomer
gcuuugacguaccuaaaucauuc

SEQ ID NO: 17865 - RNA, 23 nt, artificial
  Oligomer
cuuugacguaccuaaaucauucg

SEQ ID NO: 17866 - RNA, 23 nt, artificial
  Oligomer
uuugacguaccuaaaucauucgu

SEQ ID NO: 17867 - RNA, 23 nt, artificial
  Oligomer
uugacguaccuaaaucauucguc

SEQ ID NO: 17868 - RNA, 23 nt, artificial
  Oligomer
ugacguaccuaaaucauucgucu

SEQ ID NO: 17869 - RNA, 23 nt, artificial
  Oligomer
acacugguauucucuaaaguccc

SEQ ID NO: 17870 - RNA, 23 nt, artificial
  Oligomer
cacugguauucucuaaagucccu

SEQ ID NO: 17871 - RNA, 23 nt, artificial
  Oligomer
acugguauucucuaaagucccuu

SEQ ID NO: 17872 - RNA, 23 nt, artificial
  Oligomer
cugguauucucuaaagucccuuc

SEQ ID NO: 17873 - RNA, 23 nt, artificial
  Oligomer
ccaguugaaggucugauucacuc

SEQ ID NO: 17874 - RNA, 23 nt, artificial
  Oligomer
caguugaaggucugauucacucu

SEQ ID NO: 17875 - RNA, 23 nt, artificial
  Oligomer
aguugaaggucugauucacucuu

SEQ ID NO: 17876 - RNA, 23 nt, artificial
  Oligomer
guugaaggucugauucacucuua

SEQ ID NO: 17877 - RNA, 23 nt, artificial
  Oligomer
uugaaggucugauucacucuuaa

SEQ ID NO: 17878 - RNA, 23 nt, artificial
  Oligomer
ucacucuuaaauguccauacuug

SEQ ID NO: 17879 - RNA, 23 nt, artificial
  Oligomer
cacucuuaaauguccauacuuga

SEQ ID NO: 17880 - RNA, 23 nt, artificial
  Oligomer
acucuuaaauguccauacuugau

SEQ ID NO: 17881 - RNA, 23 nt, artificial
  Oligomer
ucuucuccauuuuccaaccagga

SEQ ID NO: 17882 - RNA, 23 nt, artificial
  Oligomer
cuucuccauuuuccaaccaggag

SEQ ID NO: 17883 - RNA, 23 nt, artificial
  Oligomer
uucuccauuuuccaaccaggaga

SEQ ID NO: 17884 - RNA, 23 nt, artificial
  Oligomer
ucuccauuuuccaaccaggagag

SEQ ID NO: 17885 - RNA, 23 nt, artificial
  Oligomer
gcucuucaacagaaacauuguga

SEQ ID NO: 17886 - RNA, 23 nt, artificial
  Oligomer
cucuucaacagaaacauugugac

SEQ ID NO: 17887 - RNA, 23 nt, artificial
  Oligomer
ucuucaacagaaacauugugacc

SEQ ID NO: 17888 - RNA, 23 nt, artificial
  Oligomer
cuucaacagaaacauugugacca

SEQ ID NO: 17889 - RNA, 23 nt, artificial
  Oligomer
uucaacagaaacauugugaccac

SEQ ID NO: 17890 - RNA, 23 nt, artificial
  Oligomer
gccacuucuuucacuuccuuggu

SEQ ID NO: 17891 - RNA, 23 nt, artificial
  Oligomer
ccacuucuuucacuuccuugguc

SEQ ID NO: 17892 - RNA, 23 nt, artificial
  Oligomer
cacuucuuucacuuccuugguca

SEQ ID NO: 17893 - RNA, 23 nt, artificial
  Oligomer
acuucuuucacuuccuuggucac

SEQ ID NO: 17894 - RNA, 23 nt, artificial
  Oligomer
uggcuuagcugccaugagaugug

SEQ ID NO: 17895 - RNA, 23 nt, artificial
  Oligomer
ggcuuagcugccaugagaugugc

SEQ ID NO: 17896 - RNA, 23 nt, artificial
  Oligomer
gcuuagcugccaugagaugugca

SEQ ID NO: 17897 - RNA, 23 nt, artificial
  Oligomer
cuuagcugccaugagaugugcau

SEQ ID NO: 17898 - RNA, 23 nt, artificial
  Oligomer
uuagcugccaugagaugugcauu

SEQ ID NO: 17899 - RNA, 23 nt, artificial
  Oligomer
caguuuuagagaaaggagucaug

SEQ ID NO: 17900 - RNA, 23 nt, artificial
  Oligomer
aguuuuagagaaaggagucauga

SEQ ID NO: 17901 - RNA, 23 nt, artificial
  Oligomer
guuuuagagaaaggagucaugag

SEQ ID NO: 17902 - RNA, 23 nt, artificial
  Oligomer
uuuuagagaaaggagucaugagu

SEQ ID NO: 17903 - RNA, 23 nt, artificial
  Oligomer
uuuagagaaaggagucaugagua

SEQ ID NO: 17904 - RNA, 23 nt, artificial
  Oligomer
ccaguuaagucuuuggacuaucc

SEQ ID NO: 17905 - RNA, 23 nt, artificial
  Oligomer
caguuaagucuuuggacuauccc

SEQ ID NO: 17906 - RNA, 23 nt, artificial
  Oligomer
aguuaagucuuuggacuaucccu

SEQ ID NO: 17907 - RNA, 23 nt, artificial
  Oligomer
guuaagucuuuggacuaucccuu

SEQ ID NO: 17908 - RNA, 23 nt, artificial
  Oligomer
uuaagucuuuggacuaucccuuu

SEQ ID NO: 17909 - RNA, 23 nt, artificial
  Oligomer
uaagucuuuggacuaucccuuuc

SEQ ID NO: 17910 - RNA, 23 nt, artificial
  Oligomer
acaauuuggacccaaguaagacc

SEQ ID NO: 17911 - RNA, 23 nt, artificial
  Oligomer
caauuuggacccaaguaagacca

SEQ ID NO: 17912 - RNA, 23 nt, artificial
  Oligomer
aauuuggacccaaguaagaccag

SEQ ID NO: 17913 - RNA, 23 nt, artificial
  Oligomer
auuuggacccaaguaagaccagg

SEQ ID NO: 17914 - RNA, 23 nt, artificial
  Oligomer
uuuggacccaaguaagaccaggg

SEQ ID NO: 17915 - RNA, 23 nt, artificial
  Oligomer
ccauuuaaagagauuaucagucc

SEQ ID NO: 17916 - RNA, 23 nt, artificial
  Oligomer
cauuuaaagagauuaucagucca

SEQ ID NO: 17917 - RNA, 23 nt, artificial
  Oligomer
auuuaaagagauuaucaguccaa

SEQ ID NO: 17918 - RNA, 23 nt, artificial
  Oligomer
uuuaaagagauuaucaguccaau

SEQ ID NO: 17919 - RNA, 23 nt, artificial
  Oligomer
uuaaagagauuaucaguccaaua

SEQ ID NO: 17920 - RNA, 23 nt, artificial
  Oligomer
aucauucgucuuacaugucagag

SEQ ID NO: 17921 - RNA, 23 nt, artificial
  Oligomer
ucauucgucuuacaugucagagg

SEQ ID NO: 17922 - RNA, 23 nt, artificial
  Oligomer
cauucgucuuacaugucagagga

SEQ ID NO: 17923 - RNA, 23 nt, artificial
  Oligomer
auucgucuuacaugucagaggaa

SEQ ID NO: 17924 - RNA, 23 nt, artificial
  Oligomer
uucgucuuacaugucagaggaaa

SEQ ID NO: 17925 - RNA, 23 nt, artificial
  Oligomer
caugucagaggaaauuaguuuug

SEQ ID NO: 17926 - RNA, 23 nt, artificial
  Oligomer
augucagaggaaauuaguuuugg

SEQ ID NO: 17927 - RNA, 23 nt, artificial
  Oligomer
ugucagaggaaauuaguuuugga

SEQ ID NO: 17928 - RNA, 23 nt, artificial
  Oligomer
gucagaggaaauuaguuuuggau

SEQ ID NO: 17929 - RNA, 23 nt, artificial
  Oligomer
ucagaggaaauuaguuuuggaua

SEQ ID NO: 17930 - RNA, 23 nt, artificial
  Oligomer
ucuacuuccagcagcacuuugcc

SEQ ID NO: 17931 - RNA, 23 nt, artificial
  Oligomer
ucccuucucaaucucucauuccu

SEQ ID NO: 17932 - RNA, 23 nt, artificial
  Oligomer
auacuugaugagacacaugaagc

SEQ ID NO: 17933 - RNA, 23 nt, artificial
  Oligomer
uacuugaugagacacaugaagcu

SEQ ID NO: 17934 - RNA, 23 nt, artificial
  Oligomer
acuugaugagacacaugaagcug

SEQ ID NO: 17935 - RNA, 23 nt, artificial
  Oligomer
cuugaugagacacaugaagcugu

SEQ ID NO: 17936 - RNA, 23 nt, artificial
  Oligomer
uugaugagacacaugaagcugug

SEQ ID NO: 17937 - RNA, 23 nt, artificial
  Oligomer
uucuuuggguaaucuucagagag

SEQ ID NO: 17938 - RNA, 23 nt, artificial
  Oligomer
ucuuuggguaaucuucagagagg

SEQ ID NO: 17939 - RNA, 23 nt, artificial
  Oligomer
cuuuggguaaucuucagagaggc

SEQ ID NO: 17940 - RNA, 23 nt, artificial
  Oligomer
uuuggguaaucuucagagaggcg

SEQ ID NO: 17941 - RNA, 23 nt, artificial
  Oligomer
uuggguaaucuucagagaggcga

SEQ ID NO: 17942 - RNA, 23 nt, artificial
  Oligomer
agucaugaguaacaugaacagca

SEQ ID NO: 17943 - RNA, 23 nt, artificial
  Oligomer
gucaugaguaacaugaacagcag

SEQ ID NO: 17944 - RNA, 23 nt, artificial
  Oligomer
ucaugaguaacaugaacagcagu

SEQ ID NO: 17945 - RNA, 23 nt, artificial
  Oligomer
caugaguaacaugaacagcaguu

SEQ ID NO: 17946 - RNA, 23 nt, artificial
  Oligomer
augaguaacaugaacagcaguug

SEQ ID NO: 17947 - RNA, 23 nt, artificial
  Oligomer
auacuuccuaugcauuacauugg

SEQ ID NO: 17948 - RNA, 23 nt, artificial
  Oligomer
uacuuccuaugcauuacauuggg

SEQ ID NO: 17949 - RNA, 23 nt, artificial
  Oligomer
acuuccuaugcauuacauugggc

SEQ ID NO: 17950 - RNA, 23 nt, artificial
  Oligomer
cuuccuaugcauuacauugggcu

SEQ ID NO: 17951 - RNA, 23 nt, artificial
  Oligomer
uuccuaugcauuacauugggcuu

SEQ ID NO: 17952 - RNA, 23 nt, artificial
  Oligomer
uggauuuaguuucacagcuugcu

SEQ ID NO: 17953 - RNA, 23 nt, artificial
  Oligomer
ggauuuaguuucacagcuugcug

SEQ ID NO: 17954 - RNA, 23 nt, artificial
  Oligomer
gauuuaguuucacagcuugcuga

SEQ ID NO: 17955 - RNA, 23 nt, artificial
  Oligomer
auuuaguuucacagcuugcugaa

SEQ ID NO: 17956 - RNA, 23 nt, artificial
  Oligomer
uuuaguuucacagcuugcugaag

SEQ ID NO: 17957 - RNA, 23 nt, artificial
  Oligomer
gacauuaggaaaucagauagucu

SEQ ID NO: 17958 - RNA, 23 nt, artificial
  Oligomer
uugauuucaggguaagacuccac

SEQ ID NO: 17959 - RNA, 23 nt, artificial
  Oligomer
uauacagggcguacacuuucccu

SEQ ID NO: 17960 - RNA, 23 nt, artificial
  Oligomer
auacagggcguacacuuucccuu

SEQ ID NO: 17961 - RNA, 23 nt, artificial
  Oligomer
cucauuccuccuucucucucugc

SEQ ID NO: 17962 - RNA, 23 nt, artificial
  Oligomer
ucauuccuccuucucucucugca

SEQ ID NO: 17963 - RNA, 23 nt, artificial
  Oligomer
gcacuucccaggugcaaaacagg

SEQ ID NO: 17964 - RNA, 23 nt, artificial
  Oligomer
cacuucccaggugcaaaacaggc

SEQ ID NO: 17965 - RNA, 23 nt, artificial
  Oligomer
acuucccaggugcaaaacaggca

SEQ ID NO: 17966 - RNA, 23 nt, artificial
  Oligomer
cuucccaggugcaaaacaggcag

SEQ ID NO: 17967 - RNA, 23 nt, artificial
  Oligomer
uucccaggugcaaaacaggcagg

SEQ ID NO: 17968 - RNA, 23 nt, artificial
  Oligomer
uugaguuaaguauuccugucaau

SEQ ID NO: 17969 - RNA, 23 nt, artificial
  Oligomer
acacugcuaguaccuuauguugg

SEQ ID NO: 17970 - RNA, 23 nt, artificial
  Oligomer
cacugcuaguaccuuauguuggu

SEQ ID NO: 17971 - RNA, 23 nt, artificial
  Oligomer
acugcuaguaccuuauguuggug

SEQ ID NO: 17972 - RNA, 23 nt, artificial
  Oligomer
cugcuaguaccuuauguuggugu

SEQ ID NO: 17973 - RNA, 23 nt, artificial
  Oligomer
ugcuaguaccuuauguugguguu

SEQ ID NO: 17974 - RNA, 23 nt, artificial
  Oligomer
agaaauaccaaggagaaaaagcc

SEQ ID NO: 17975 - RNA, 23 nt, artificial
  Oligomer
gaaauaccaaggagaaaaagcca

SEQ ID NO: 17976 - RNA, 23 nt, artificial
  Oligomer
aaauaccaaggagaaaaagccau

SEQ ID NO: 17977 - RNA, 23 nt, artificial
  Oligomer
aauaccaaggagaaaaagccauc

SEQ ID NO: 17978 - RNA, 23 nt, artificial
  Oligomer
auaccaaggagaaaaagccaucu

SEQ ID NO: 17979 - RNA, 23 nt, artificial
  Oligomer
uacuuuacagaggguuugaguuc

SEQ ID NO: 17980 - RNA, 23 nt, artificial
  Oligomer
acuuuacagaggguuugaguuca

SEQ ID NO: 17981 - RNA, 23 nt, artificial
  Oligomer
cuuuacagaggguuugaguucac

SEQ ID NO: 17982 - RNA, 23 nt, artificial
  Oligomer
uuuacagaggguuugaguucacu

SEQ ID NO: 17983 - RNA, 23 nt, artificial
  Oligomer
uuacagaggguuugaguucacuc

SEQ ID NO: 17984 - RNA, 23 nt, artificial
  Oligomer
uuaguuucacagcuugcugaaga

SEQ ID NO: 17985 - RNA, 23 nt, artificial
  Oligomer
ucaauugcaaauggaggugggac

SEQ ID NO: 17986 - RNA, 23 nt, artificial
  Oligomer
caauugcaaauggaggugggacc

SEQ ID NO: 17987 - RNA, 23 nt, artificial
  Oligomer
aauugcaaauggaggugggaccu

SEQ ID NO: 17988 - RNA, 23 nt, artificial
  Oligomer
auugcaaauggaggugggaccuu

SEQ ID NO: 17989 - RNA, 23 nt, artificial
  Oligomer
uugcaaauggaggugggaccuuc

SEQ ID NO: 17990 - RNA, 23 nt, artificial
  Oligomer
uacagggcguacacuuucccuuc

SEQ ID NO: 17991 - RNA, 23 nt, artificial
  Oligomer
cauuccuccuucucucucugcau

SEQ ID NO: 17992 - RNA, 23 nt, artificial
  Oligomer
auuccuccuucucucucugcauc

SEQ ID NO: 17993 - RNA, 23 nt, artificial
  Oligomer
uuccuccuucucucucugcaucu

SEQ ID NO: 17994 - RNA, 23 nt, artificial
  Oligomer
uccauacuugaugagacacauga

SEQ ID NO: 17995 - RNA, 23 nt, artificial
  Oligomer
ccauacuugaugagacacaugaa

SEQ ID NO: 17996 - RNA, 23 nt, artificial
  Oligomer
cauacuugaugagacacaugaag

SEQ ID NO: 17997 - RNA, 23 nt, artificial
  Oligomer
gaaauugagguauggacacuugg

SEQ ID NO: 17998 - RNA, 23 nt, artificial
  Oligomer
aaauugagguauggacacuugga

SEQ ID NO: 17999 - RNA, 23 nt, artificial
  Oligomer
aauugagguauggacacuuggau

SEQ ID NO: 18000 - RNA, 23 nt, artificial
  Oligomer
auugagguauggacacuuggaug

SEQ ID NO: 18001 - RNA, 23 nt, artificial
  Oligomer
uugagguauggacacuuggaugg

SEQ ID NO: 18002 - RNA, 23 nt, artificial
  Oligomer
uuuguuucuucccuuaguauugc

SEQ ID NO: 18003 - RNA, 23 nt, artificial
  Oligomer
uuguuucuucccuuaguauugcu

SEQ ID NO: 18004 - RNA, 23 nt, artificial
  Oligomer
aguauugcugacaaaguaucugc

SEQ ID NO: 18005 - RNA, 23 nt, artificial
  Oligomer
guauugcugacaaaguaucugcu

SEQ ID NO: 18006 - RNA, 23 nt, artificial
  Oligomer
uauugcugacaaaguaucugcug

SEQ ID NO: 18007 - RNA, 23 nt, artificial
  Oligomer
auugcugacaaaguaucugcugu

SEQ ID NO: 18008 - RNA, 23 nt, artificial
  Oligomer
uugcugacaaaguaucugcugua

SEQ ID NO: 18009 - RNA, 23 nt, artificial
  Oligomer
cuuuugcuguucaacuccagauu

SEQ ID NO: 18010 - RNA, 23 nt, artificial
  Oligomer
uuuugcuguucaacuccagauuu

SEQ ID NO: 18011 - RNA, 23 nt, artificial
  Oligomer
uggcuaugucuuuccaguucucu

SEQ ID NO: 18012 - RNA, 23 nt, artificial
  Oligomer
ggcuaugucuuuccaguucucug

SEQ ID NO: 18013 - RNA, 23 nt, artificial
  Oligomer
gcuaugucuuuccaguucucugc

SEQ ID NO: 18014 - RNA, 23 nt, artificial
  Oligomer
cuaugucuuuccaguucucugcu

SEQ ID NO: 18015 - RNA, 23 nt, artificial
  Oligomer
uaugucuuuccaguucucugcug

SEQ ID NO: 18016 - RNA, 23 nt, artificial
  Oligomer
gaagucagcuuugacugauaacg

SEQ ID NO: 18017 - RNA, 23 nt, artificial
  Oligomer
aagucagcuuugacugauaacgu

SEQ ID NO: 18018 - RNA, 23 nt, artificial
  Oligomer
agucagcuuugacugauaacguc

SEQ ID NO: 18019 - RNA, 23 nt, artificial
  Oligomer
gucagcuuugacugauaacguca

SEQ ID NO: 18020 - RNA, 23 nt, artificial
  Oligomer
ucagcuuugacugauaacgucac

SEQ ID NO: 18021 - RNA, 23 nt, artificial
  Oligomer
ucuguuacuuuacagaggguuug

SEQ ID NO: 18022 - RNA, 23 nt, artificial
  Oligomer
cuguuacuuuacagaggguuuga

SEQ ID NO: 18023 - RNA, 23 nt, artificial
  Oligomer
uguuacuuuacagaggguuugag

SEQ ID NO: 18024 - RNA, 23 nt, artificial
  Oligomer
guuacuuuacagaggguuugagu

SEQ ID NO: 18025 - RNA, 23 nt, artificial
  Oligomer
uuacuuuacagaggguuugaguu

SEQ ID NO: 18026 - RNA, 23 nt, artificial
  Oligomer
aauguugucuucuuuugcuguuc

SEQ ID NO: 18027 - RNA, 23 nt, artificial
  Oligomer
auguugucuucuuuugcuguuca

SEQ ID NO: 18028 - RNA, 23 nt, artificial
  Oligomer
uguugucuucuuuugcuguucaa

SEQ ID NO: 18029 - RNA, 23 nt, artificial
  Oligomer
guugucuucuuuugcuguucaac

SEQ ID NO: 18030 - RNA, 23 nt, artificial
  Oligomer
uugucuucuuuugcuguucaacu

SEQ ID NO: 18031 - RNA, 23 nt, artificial
  Oligomer
uccaauaugaaccaguuaagucu

SEQ ID NO: 18032 - RNA, 23 nt, artificial
  Oligomer
ccaauaugaaccaguuaagucuu

SEQ ID NO: 18033 - RNA, 23 nt, artificial
  Oligomer
caauaugaaccaguuaagucuuu

SEQ ID NO: 18034 - RNA, 23 nt, artificial
  Oligomer
aauaugaaccaguuaagucuuug

SEQ ID NO: 18035 - RNA, 23 nt, artificial
  Oligomer
auaugaaccaguuaagucuuugg

SEQ ID NO: 18036 - RNA, 23 nt, artificial
  Oligomer
ucccuuuccuccuugacuacugc

SEQ ID NO: 18037 - RNA, 23 nt, artificial
  Oligomer
cccuuuccuccuugacuacugcu

SEQ ID NO: 18038 - RNA, 23 nt, artificial
  Oligomer
ccuuuccuccuugacuacugcuu

SEQ ID NO: 18039 - RNA, 23 nt, artificial
  Oligomer
cuuuccuccuugacuacugcuuu

SEQ ID NO: 18040 - RNA, 23 nt, artificial
  Oligomer
uuuccuccuugacuacugcuuug

SEQ ID NO: 18041 - RNA, 23 nt, artificial
  Oligomer
uaguuucacagcuugcugaagaa

SEQ ID NO: 18042 - RNA, 23 nt, artificial
  Oligomer
aguuucacagcuugcugaagaaa

SEQ ID NO: 18043 - RNA, 23 nt, artificial
  Oligomer
guuucacagcuugcugaagaaaa

SEQ ID NO: 18044 - RNA, 23 nt, artificial
  Oligomer
uuucacagcuugcugaagaaaaa

SEQ ID NO: 18045 - RNA, 23 nt, artificial
  Oligomer
ucucugaaguugaccuguuauug

SEQ ID NO: 18046 - RNA, 23 nt, artificial
  Oligomer
cucugaaguugaccuguuauugg

SEQ ID NO: 18047 - RNA, 23 nt, artificial
  Oligomer
ucugaaguugaccuguuauugga

SEQ ID NO: 18048 - RNA, 23 nt, artificial
  Oligomer
cugaaguugaccuguuauuggac

SEQ ID NO: 18049 - RNA, 23 nt, artificial
  Oligomer
ugaaguugaccuguuauuggaca

SEQ ID NO: 18050 - RNA, 23 nt, artificial
  Oligomer
guuauuggacaaauucuacuucc

SEQ ID NO: 18051 - RNA, 23 nt, artificial
  Oligomer
uuauuggacaaauucuacuucca

SEQ ID NO: 18052 - RNA, 23 nt, artificial
  Oligomer
uauuggacaaauucuacuuccag

SEQ ID NO: 18053 - RNA, 23 nt, artificial
  Oligomer
auuggacaaauucuacuuccagc

SEQ ID NO: 18054 - RNA, 23 nt, artificial
  Oligomer
uuggacaaauucuacuuccagca

SEQ ID NO: 18055 - RNA, 23 nt, artificial
  Oligomer
gcguacacuuucccuucucaauc

SEQ ID NO: 18056 - RNA, 23 nt, artificial
  Oligomer
cguacacuuucccuucucaaucu

SEQ ID NO: 18057 - RNA, 23 nt, artificial
  Oligomer
guacacuuucccuucucaaucuc

SEQ ID NO: 18058 - RNA, 23 nt, artificial
  Oligomer
uacacuuucccuucucaaucucu

SEQ ID NO: 18059 - RNA, 23 nt, artificial
  Oligomer
ucaaucucucauuccuccuucuc

SEQ ID NO: 18060 - RNA, 23 nt, artificial
  Oligomer
caaucucucauuccuccuucucu

SEQ ID NO: 18061 - RNA, 23 nt, artificial
  Oligomer
uuuuucauacuucagaacaacac

SEQ ID NO: 18062 - RNA, 23 nt, artificial
  Oligomer
uuuucauacuucagaacaacaca

SEQ ID NO: 18063 - RNA, 23 nt, artificial
  Oligomer
uuucauacuucagaacaacacac

SEQ ID NO: 18064 - RNA, 23 nt, artificial
  Oligomer
uucauacuucagaacaacacacu

SEQ ID NO: 18065 - RNA, 23 nt, artificial
  Oligomer
ucauacuucagaacaacacacuc

SEQ ID NO: 18066 - RNA, 23 nt, artificial
  Oligomer
guucuuguacucgggccauauau

SEQ ID NO: 18067 - RNA, 23 nt, artificial
  Oligomer
uucuuguacucgggccauauauu

SEQ ID NO: 18068 - RNA, 23 nt, artificial
  Oligomer
ucuuguacucgggccauauauuc

SEQ ID NO: 18069 - RNA, 23 nt, artificial
  Oligomer
cuuguacucgggccauauauuca

SEQ ID NO: 18070 - RNA, 23 nt, artificial
  Oligomer
uuguacucgggccauauauucau

SEQ ID NO: 18071 - RNA, 23 nt, artificial
  Oligomer
gaguuugugccagcucuucaaca

SEQ ID NO: 18072 - RNA, 23 nt, artificial
  Oligomer
aguuugugccagcucuucaacag

SEQ ID NO: 18073 - RNA, 23 nt, artificial
  Oligomer
guuugugccagcucuucaacaga

SEQ ID NO: 18074 - RNA, 23 nt, artificial
  Oligomer
uuugugccagcucuucaacagaa

SEQ ID NO: 18075 - RNA, 23 nt, artificial
  Oligomer
uugugccagcucuucaacagaaa

SEQ ID NO: 18076 - RNA, 23 nt, artificial
  Oligomer
caacuuuguuucuucccuuagua

SEQ ID NO: 18077 - RNA, 23 nt, artificial
  Oligomer
aacuuuguuucuucccuuaguau

SEQ ID NO: 18078 - RNA, 23 nt, artificial
  Oligomer
acuuuguuucuucccuuaguauu

SEQ ID NO: 18079 - RNA, 23 nt, artificial
  Oligomer
cuuuguuucuucccuuaguauug

SEQ ID NO: 18080 - RNA, 23 nt, artificial
  Oligomer
aaucuucuacucugacauuagga

SEQ ID NO: 18081 - RNA, 23 nt, artificial
  Oligomer
aucuucuacucugacauuaggaa

SEQ ID NO: 18082 - RNA, 23 nt, artificial
  Oligomer
ucuucuacucugacauuaggaaa

SEQ ID NO: 18083 - RNA, 23 nt, artificial
  Oligomer
cuucuacucugacauuaggaaau

SEQ ID NO: 18084 - RNA, 23 nt, artificial
  Oligomer
uucuacucugacauuaggaaauc

SEQ ID NO: 18085 - RNA, 23 nt, artificial
  Oligomer
cagcuugcugaagaaaaauucca

SEQ ID NO: 18086 - RNA, 23 nt, artificial
  Oligomer
agcuugcugaagaaaaauuccac

SEQ ID NO: 18087 - RNA, 23 nt, artificial
  Oligomer
gcuugcugaagaaaaauuccacu

SEQ ID NO: 18088 - RNA, 23 nt, artificial
  Oligomer
cuugcugaagaaaaauuccacuu

SEQ ID NO: 18089 - RNA, 23 nt, artificial
  Oligomer
uugcugaagaaaaauuccacuuu

SEQ ID NO: 18090 - RNA, 23 nt, artificial
  Oligomer
agacuccacuucugagauguucu

SEQ ID NO: 18091 - RNA, 23 nt, artificial
  Oligomer
gacuccacuucugagauguucuc

SEQ ID NO: 18092 - RNA, 23 nt, artificial
  Oligomer
acuccacuucugagauguucucu

SEQ ID NO: 18093 - RNA, 23 nt, artificial
  Oligomer
cuccacuucugagauguucucuu

SEQ ID NO: 18094 - RNA, 23 nt, artificial
  Oligomer
uccacuucugagauguucucuuc

SEQ ID NO: 18095 - RNA, 23 nt, artificial
  Oligomer
ugagauuaagguaauggcccagg

SEQ ID NO: 18096 - RNA, 23 nt, artificial
  Oligomer
gagauuaagguaauggcccagga

SEQ ID NO: 18097 - RNA, 23 nt, artificial
  Oligomer
agauuaagguaauggcccaggau

SEQ ID NO: 18098 - RNA, 23 nt, artificial
  Oligomer
gauuaagguaauggcccaggaug

SEQ ID NO: 18099 - RNA, 23 nt, artificial
  Oligomer
auuaagguaauggcccaggaugg

SEQ ID NO: 18100 - RNA, 23 nt, artificial
  Oligomer
gaaauccaguuugcugcuaacag

SEQ ID NO: 18101 - RNA, 23 nt, artificial
  Oligomer
aaauccaguuugcugcuaacagc

SEQ ID NO: 18102 - RNA, 23 nt, artificial
  Oligomer
aauccaguuugcugcuaacagca

SEQ ID NO: 18103 - RNA, 23 nt, artificial
  Oligomer
auccaguuugcugcuaacagcau

SEQ ID NO: 18104 - RNA, 23 nt, artificial
  Oligomer
uccaguuugcugcuaacagcaua

SEQ ID NO: 18105 - RNA, 23 nt, artificial
  Oligomer
cuuuuucauacuucagaacaaca

SEQ ID NO: 18106 - RNA, 23 nt, artificial
  Oligomer
agacaucauagucagcaccauuu

SEQ ID NO: 18107 - RNA, 23 nt, artificial
  Oligomer
gacaucauagucagcaccauuuu

SEQ ID NO: 18108 - RNA, 23 nt, artificial
  Oligomer
acaucauagucagcaccauuuuc

SEQ ID NO: 18109 - RNA, 23 nt, artificial
  Oligomer
acacuuggauggugauguucccu

SEQ ID NO: 18110 - RNA, 23 nt, artificial
  Oligomer
cacuuggauggugauguucccug

SEQ ID NO: 18111 - RNA, 23 nt, artificial
  Oligomer
acuuggauggugauguucccugc

SEQ ID NO: 18112 - RNA, 23 nt, artificial
  Oligomer
cuuggauggugauguucccugcc

SEQ ID NO: 18113 - RNA, 23 nt, artificial
  Oligomer
uuggauggugauguucccugccu

SEQ ID NO: 18114 - RNA, 23 nt, artificial
  Oligomer
augucuuuccaguucucugcuga

SEQ ID NO: 18115 - RNA, 23 nt, artificial
  Oligomer
ugucuuuccaguucucugcugau

SEQ ID NO: 18116 - RNA, 23 nt, artificial
  Oligomer
gacuaucccuuuccuccuugacu

SEQ ID NO: 18117 - RNA, 23 nt, artificial
  Oligomer
acuaucccuuuccuccuugacua

SEQ ID NO: 18118 - RNA, 23 nt, artificial
  Oligomer
cuaucccuuuccuccuugacuac

SEQ ID NO: 18119 - RNA, 23 nt, artificial
  Oligomer
uaucccuuuccuccuugacuacu

SEQ ID NO: 18120 - RNA, 23 nt, artificial
  Oligomer
aucccuuuccuccuugacuacug

SEQ ID NO: 18121 - RNA, 23 nt, artificial
  Oligomer
caguuaacaggccacagucaaac

SEQ ID NO: 18122 - RNA, 23 nt, artificial
  Oligomer
aguuaacaggccacagucaaacu

SEQ ID NO: 18123 - RNA, 23 nt, artificial
  Oligomer
guuaacaggccacagucaaacug

SEQ ID NO: 18124 - RNA, 23 nt, artificial
  Oligomer
uuaacaggccacagucaaacuga

SEQ ID NO: 18125 - RNA, 23 nt, artificial
  Oligomer
uaacaggccacagucaaacugau

SEQ ID NO: 18126 - RNA, 23 nt, artificial
  Oligomer
gggguaaucuuguccaucugagg

SEQ ID NO: 18127 - RNA, 23 nt, artificial
  Oligomer
ggguaaucuuguccaucugagga

SEQ ID NO: 18128 - RNA, 23 nt, artificial
  Oligomer
gguaaucuuguccaucugaggaa

SEQ ID NO: 18129 - RNA, 23 nt, artificial
  Oligomer
guaaucuuguccaucugaggaag

SEQ ID NO: 18130 - RNA, 23 nt, artificial
  Oligomer
uaaucuuguccaucugaggaagu

SEQ ID NO: 18131 - RNA, 23 nt, artificial
  Oligomer
uugguuguauuccaguugaaggu

SEQ ID NO: 18132 - RNA, 23 nt, artificial
  Oligomer
ugguuguauuccaguugaagguc

SEQ ID NO: 18133 - RNA, 23 nt, artificial
  Oligomer
gguuguauuccaguugaaggucu

SEQ ID NO: 18134 - RNA, 23 nt, artificial
  Oligomer
guuguauuccaguugaaggucug

SEQ ID NO: 18135 - RNA, 23 nt, artificial
  Oligomer
uuguauuccaguugaaggucuga

SEQ ID NO: 18136 - RNA, 23 nt, artificial
  Oligomer
ugccaguagaugcgaguuugugc

SEQ ID NO: 18137 - RNA, 23 nt, artificial
  Oligomer
gccaguagaugcgaguuugugcc

SEQ ID NO: 18138 - RNA, 23 nt, artificial
  Oligomer
ccaguagaugcgaguuugugcca

SEQ ID NO: 18139 - RNA, 23 nt, artificial
  Oligomer
caguagaugcgaguuugugccag

SEQ ID NO: 18140 - RNA, 23 nt, artificial
  Oligomer
aguagaugcgaguuugugccagc

SEQ ID NO: 18141 - RNA, 23 nt, artificial
  Oligomer
cgaguuugugccagcucuucaac

SEQ ID NO: 18142 - RNA, 23 nt, artificial
  Oligomer
uggauggugauguucccugccuc

SEQ ID NO: 18143 - RNA, 23 nt, artificial
  Oligomer
ucaacuuuguuucuucccuuagu

SEQ ID NO: 18144 - RNA, 23 nt, artificial
  Oligomer
aagguuugugaagcagcauagug

SEQ ID NO: 18145 - RNA, 23 nt, artificial
  Oligomer
agguuugugaagcagcauaguga

SEQ ID NO: 18146 - RNA, 23 nt, artificial
  Oligomer
gguuugugaagcagcauagugag

SEQ ID NO: 18147 - RNA, 23 nt, artificial
  Oligomer
guuugugaagcagcauagugagg

SEQ ID NO: 18148 - RNA, 23 nt, artificial
  Oligomer
uuugugaagcagcauagugaggu

SEQ ID NO: 18149 - RNA, 23 nt, artificial
  Oligomer
ccacuucuggucuagugaauugu

SEQ ID NO: 18150 - RNA, 23 nt, artificial
  Oligomer
cacuucuggucuagugaauugug

SEQ ID NO: 18151 - RNA, 23 nt, artificial
  Oligomer
acuucuggucuagugaauugugg

SEQ ID NO: 18152 - RNA, 23 nt, artificial
  Oligomer
cuucuggucuagugaauugugga

SEQ ID NO: 18153 - RNA, 23 nt, artificial
  Oligomer
uucuggucuagugaauuguggaa

SEQ ID NO: 18154 - RNA, 23 nt, artificial
  Oligomer
agacauuugaagauagcuuacug

SEQ ID NO: 18155 - RNA, 23 nt, artificial
  Oligomer
uaguacauacacuguaaacaacg

SEQ ID NO: 18156 - RNA, 23 nt, artificial
  Oligomer
aguacauacacuguaaacaacga

SEQ ID NO: 18157 - RNA, 23 nt, artificial
  Oligomer
guacauacacuguaaacaacgau

SEQ ID NO: 18158 - RNA, 23 nt, artificial
  Oligomer
ggagugagagagcagcaauagag

SEQ ID NO: 18159 - RNA, 23 nt, artificial
  Oligomer
gagugagagagcagcaauagaga

SEQ ID NO: 18160 - RNA, 23 nt, artificial
  Oligomer
agugagagagcagcaauagagaa

SEQ ID NO: 18161 - RNA, 23 nt, artificial
  Oligomer
gugagagagcagcaauagagaac

SEQ ID NO: 18162 - RNA, 23 nt, artificial
  Oligomer
ugagagagcagcaauagagaaca

SEQ ID NO: 18163 - RNA, 23 nt, artificial
  Oligomer
agguuguggauuuaguuucacag

SEQ ID NO: 18164 - RNA, 23 nt, artificial
  Oligomer
gguuguggauuuaguuucacagc

SEQ ID NO: 18165 - RNA, 23 nt, artificial
  Oligomer
guuguggauuuaguuucacagcu

SEQ ID NO: 18166 - RNA, 23 nt, artificial
  Oligomer
uuguggauuuaguuucacagcuu

SEQ ID NO: 18167 - RNA, 23 nt, artificial
  Oligomer
uguggauuuaguuucacagcuug

SEQ ID NO: 18168 - RNA, 23 nt, artificial
  Oligomer
gcaguaggucaggcagcauauca

SEQ ID NO: 18169 - RNA, 23 nt, artificial
  Oligomer
caguaggucaggcagcauaucac

SEQ ID NO: 18170 - RNA, 23 nt, artificial
  Oligomer
aguaggucaggcagcauaucaca

SEQ ID NO: 18171 - RNA, 23 nt, artificial
  Oligomer
guaggucaggcagcauaucacaa

SEQ ID NO: 18172 - RNA, 23 nt, artificial
  Oligomer
uaggucaggcagcauaucacaaa

SEQ ID NO: 18173 - RNA, 23 nt, artificial
  Oligomer
agguuaucaggaaaaugcucuug

SEQ ID NO: 18174 - RNA, 23 nt, artificial
  Oligomer
gguuaucaggaaaaugcucuugc

SEQ ID NO: 18175 - RNA, 23 nt, artificial
  Oligomer
guuaucaggaaaaugcucuugcu

SEQ ID NO: 18176 - RNA, 23 nt, artificial
  Oligomer
ucauauugaaauccaguuugcug

SEQ ID NO: 18177 - RNA, 23 nt, artificial
  Oligomer
aagaaacgguucaacuuuguuuc

SEQ ID NO: 18178 - RNA, 23 nt, artificial
  Oligomer
agaaacgguucaacuuuguuucu

SEQ ID NO: 18179 - RNA, 23 nt, artificial
  Oligomer
gaaacgguucaacuuuguuucuu

SEQ ID NO: 18180 - RNA, 23 nt, artificial
  Oligomer
aaacgguucaacuuuguuucuuc

SEQ ID NO: 18181 - RNA, 23 nt, artificial
  Oligomer
aacgguucaacuuuguuucuucc

SEQ ID NO: 18182 - RNA, 23 nt, artificial
  Oligomer
uugugaagcagcauagugaggua

SEQ ID NO: 18183 - RNA, 23 nt, artificial
  Oligomer
uggcucuaaaggcuuuaaauccc

SEQ ID NO: 18184 - RNA, 23 nt, artificial
  Oligomer
ggcucuaaaggcuuuaaauccca

SEQ ID NO: 18185 - RNA, 23 nt, artificial
  Oligomer
gcucuaaaggcuuuaaaucccag

SEQ ID NO: 18186 - RNA, 23 nt, artificial
  Oligomer
cucuaaaggcuuuaaaucccagc

SEQ ID NO: 18187 - RNA, 23 nt, artificial
  Oligomer
ucuaaaggcuuuaaaucccagcc

SEQ ID NO: 18188 - RNA, 23 nt, artificial
  Oligomer
uaaguugcguccacuucuggucu

SEQ ID NO: 18189 - RNA, 23 nt, artificial
  Oligomer
gagauuaucaguccaauaugaac

SEQ ID NO: 18190 - RNA, 23 nt, artificial
  Oligomer
cauacuuccuaugcauuacauug

SEQ ID NO: 18191 - RNA, 23 nt, artificial
  Oligomer
uauauguauauaccaguuaacag

SEQ ID NO: 18192 - RNA, 23 nt, artificial
  Oligomer
auauguauauaccaguuaacagg

SEQ ID NO: 18193 - RNA, 23 nt, artificial
  Oligomer
uauguauauaccaguuaacaggc

SEQ ID NO: 18194 - RNA, 23 nt, artificial
  Oligomer
auguauauaccaguuaacaggcc

SEQ ID NO: 18195 - RNA, 23 nt, artificial
  Oligomer
uguauauaccaguuaacaggcca

SEQ ID NO: 18196 - RNA, 23 nt, artificial
  Oligomer
uucccuucucaaucucucauucc

SEQ ID NO: 18197 - RNA, 23 nt, artificial
  Oligomer
ugacugauaacgucacuucagcc

SEQ ID NO: 18198 - RNA, 23 nt, artificial
  Oligomer
gacugauaacgucacuucagcca

SEQ ID NO: 18199 - RNA, 23 nt, artificial
  Oligomer
acugauaacgucacuucagccag

SEQ ID NO: 18200 - RNA, 23 nt, artificial
  Oligomer
cugauaacgucacuucagccagg

SEQ ID NO: 18201 - RNA, 23 nt, artificial
  Oligomer
ugauaacgucacuucagccaggu

SEQ ID NO: 18202 - RNA, 23 nt, artificial
  Oligomer
uaccuuauguugguguuagaccu

SEQ ID NO: 18203 - RNA, 23 nt, artificial
  Oligomer
accuuauguugguguuagaccuc

SEQ ID NO: 18204 - RNA, 23 nt, artificial
  Oligomer
ccuuauguugguguuagaccucu

SEQ ID NO: 18205 - RNA, 23 nt, artificial
  Oligomer
cuuauguugguguuagaccucuc

SEQ ID NO: 18206 - RNA, 23 nt, artificial
  Oligomer
uuauguugguguuagaccucucu

SEQ ID NO: 18207 - RNA, 23 nt, artificial
  Oligomer
ugagaaauguugucuucuuuugc

SEQ ID NO: 18208 - RNA, 23 nt, artificial
  Oligomer
gagaaauguugucuucuuuugcu

SEQ ID NO: 18209 - RNA, 23 nt, artificial
  Oligomer
agaaauguugucuucuuuugcug

SEQ ID NO: 18210 - RNA, 23 nt, artificial
  Oligomer
gaaauguugucuucuuuugcugu

SEQ ID NO: 18211 - RNA, 23 nt, artificial
  Oligomer
aaauguugucuucuuuugcuguu

SEQ ID NO: 18212 - RNA, 23 nt, artificial
  Oligomer
uuagagaaaggagucaugaguaa

SEQ ID NO: 18213 - RNA, 23 nt, artificial
  Oligomer
ugcuuugacguaccuaaaucauu

SEQ ID NO: 18214 - RNA, 23 nt, artificial
  Oligomer
uggauaguucuccuuucugcugu

SEQ ID NO: 18215 - RNA, 23 nt, artificial
  Oligomer
ggauaguucuccuuucugcugua

SEQ ID NO: 18216 - RNA, 23 nt, artificial
  Oligomer
gauaguucuccuuucugcuguac

SEQ ID NO: 18217 - RNA, 23 nt, artificial
  Oligomer
uagucuccuaaagauguucaugc

SEQ ID NO: 18218 - RNA, 23 nt, artificial
  Oligomer
agucuccuaaagauguucaugcc

SEQ ID NO: 18219 - RNA, 23 nt, artificial
  Oligomer
gucuccuaaagauguucaugcca

SEQ ID NO: 18220 - RNA, 23 nt, artificial
  Oligomer
ucuccuaaagauguucaugccau

SEQ ID NO: 18221 - RNA, 23 nt, artificial
  Oligomer
cuccuaaagauguucaugccaua

SEQ ID NO: 18222 - RNA, 23 nt, artificial
  Oligomer
cucaaucucucauuccuccuucu

SEQ ID NO: 18223 - RNA, 23 nt, artificial
  Oligomer
ugguugucauauugaaauccagu

SEQ ID NO: 18224 - RNA, 23 nt, artificial
  Oligomer
gguugucauauugaaauccaguu

SEQ ID NO: 18225 - RNA, 23 nt, artificial
  Oligomer
guugucauauugaaauccaguuu

SEQ ID NO: 18226 - RNA, 23 nt, artificial
  Oligomer
uugucauauugaaauccaguuug

SEQ ID NO: 18227 - RNA, 23 nt, artificial
  Oligomer
ugucauauugaaauccaguuugc

SEQ ID NO: 18228 - RNA, 23 nt, artificial
  Oligomer
guugauggcauuuaauucuucuc

SEQ ID NO: 18229 - RNA, 23 nt, artificial
  Oligomer
ccauuuuccaaccaggagaggug

SEQ ID NO: 18230 - RNA, 23 nt, artificial
  Oligomer
cauuuuccaaccaggagagguga

SEQ ID NO: 18231 - RNA, 23 nt, artificial
  Oligomer
auuuuccaaccaggagaggugag

SEQ ID NO: 18232 - RNA, 23 nt, artificial
  Oligomer
uuuuccaaccaggagaggugagg

SEQ ID NO: 18233 - RNA, 23 nt, artificial
  Oligomer
uuuccaaccaggagaggugaggc

SEQ ID NO: 18234 - RNA, 23 nt, artificial
  Oligomer
ucuuuuucauacuucagaacaac

SEQ ID NO: 18235 - RNA, 23 nt, artificial
  Oligomer
agugaaagccaacaauuuggacc

SEQ ID NO: 18236 - RNA, 23 nt, artificial
  Oligomer
gugaaagccaacaauuuggaccc

SEQ ID NO: 18237 - RNA, 23 nt, artificial
  Oligomer
ugaaagccaacaauuuggaccca

SEQ ID NO: 18238 - RNA, 23 nt, artificial
  Oligomer
gaaagccaacaauuuggacccaa

SEQ ID NO: 18239 - RNA, 23 nt, artificial
  Oligomer
aaagccaacaauuuggacccaag

SEQ ID NO: 18240 - RNA, 23 nt, artificial
  Oligomer
ugcauuugagaaauguugucuuc

SEQ ID NO: 18241 - RNA, 23 nt, artificial
  Oligomer
gcauuugagaaauguugucuucu

SEQ ID NO: 18242 - RNA, 23 nt, artificial
  Oligomer
cauuugagaaauguugucuucuu

SEQ ID NO: 18243 - RNA, 23 nt, artificial
  Oligomer
auuugagaaauguugucuucuuu

SEQ ID NO: 18244 - RNA, 23 nt, artificial
  Oligomer
uuugagaaauguugucuucuuuu

SEQ ID NO: 18245 - RNA, 23 nt, artificial
  Oligomer
ucagaugauaaugugauuauccc

SEQ ID NO: 18246 - RNA, 23 nt, artificial
  Oligomer
cagaugauaaugugauuauccca

SEQ ID NO: 18247 - RNA, 23 nt, artificial
  Oligomer
agaugauaaugugauuaucccag

SEQ ID NO: 18248 - RNA, 23 nt, artificial
  Oligomer
gaugauaaugugauuaucccagc

SEQ ID NO: 18249 - RNA, 23 nt, artificial
  Oligomer
augauaaugugauuaucccagcu

SEQ ID NO: 18250 - RNA, 23 nt, artificial
  Oligomer
gucuuuccaguucucugcugaug

SEQ ID NO: 18251 - RNA, 23 nt, artificial
  Oligomer
ucuuuccaguucucugcugaugu

SEQ ID NO: 18252 - RNA, 23 nt, artificial
  Oligomer
cuuuccaguucucugcugauguc

SEQ ID NO: 18253 - RNA, 23 nt, artificial
  Oligomer
uuuccaguucucugcugauguca

SEQ ID NO: 18254 - RNA, 23 nt, artificial
  Oligomer
uuccaguucucugcugaugucag

SEQ ID NO: 18255 - RNA, 23 nt, artificial
  Oligomer
uccaguucucugcugaugucaga

SEQ ID NO: 18256 - RNA, 23 nt, artificial
  Oligomer
ccuauggaaaguuacuaccuuag

SEQ ID NO: 18257 - RNA, 23 nt, artificial
  Oligomer
cuauggaaaguuacuaccuuaga

SEQ ID NO: 18258 - RNA, 23 nt, artificial
  Oligomer
uauggaaaguuacuaccuuagac

SEQ ID NO: 18259 - RNA, 23 nt, artificial
  Oligomer
auggaaaguuacuaccuuagaca

SEQ ID NO: 18260 - RNA, 23 nt, artificial
  Oligomer
uggaaaguuacuaccuuagacau

SEQ ID NO: 18261 - RNA, 23 nt, artificial
  Oligomer
ugcuucugcggacacuguuauac

SEQ ID NO: 18262 - RNA, 23 nt, artificial
  Oligomer
gcuucugcggacacuguuauaca

SEQ ID NO: 18263 - RNA, 23 nt, artificial
  Oligomer
cuucugcggacacuguuauacag

SEQ ID NO: 18264 - RNA, 23 nt, artificial
  Oligomer
uucugcggacacuguuauacagg

SEQ ID NO: 18265 - RNA, 23 nt, artificial
  Oligomer
ucugcggacacuguuauacaggg

SEQ ID NO: 18266 - RNA, 23 nt, artificial
  Oligomer
auuuacugagauuaagguaaugg

SEQ ID NO: 18267 - RNA, 23 nt, artificial
  Oligomer
uuuacugagauuaagguaauggc

SEQ ID NO: 18268 - RNA, 23 nt, artificial
  Oligomer
uuacugagauuaagguaauggcc

SEQ ID NO: 18269 - RNA, 23 nt, artificial
  Oligomer
uacugagauuaagguaauggccc

SEQ ID NO: 18270 - RNA, 23 nt, artificial
  Oligomer
acugagauuaagguaauggccca

SEQ ID NO: 18271 - RNA, 23 nt, artificial
  Oligomer
cuugguuguauuccaguugaagg

SEQ ID NO: 18272 - RNA, 23 nt, artificial
  Oligomer
ugagauguucucuucuuacaguc

SEQ ID NO: 18273 - RNA, 23 nt, artificial
  Oligomer
gagauguucucuucuuacagucu

SEQ ID NO: 18274 - RNA, 23 nt, artificial
  Oligomer
agauguucucuucuuacagucua

SEQ ID NO: 18275 - RNA, 23 nt, artificial
  Oligomer
gauguucucuucuuacagucuau

SEQ ID NO: 18276 - RNA, 23 nt, artificial
  Oligomer
auguucucuucuuacagucuaua

SEQ ID NO: 18277 - RNA, 23 nt, artificial
  Oligomer
ucucuucuuacagucuauaaagc

SEQ ID NO: 18278 - RNA, 23 nt, artificial
  Oligomer
cucuucuuacagucuauaaagca

SEQ ID NO: 18279 - RNA, 23 nt, artificial
  Oligomer
ucuucuuacagucuauaaagcaa

SEQ ID NO: 18280 - RNA, 23 nt, artificial
  Oligomer
cuucuuacagucuauaaagcaau

SEQ ID NO: 18281 - RNA, 23 nt, artificial
  Oligomer
uucuuacagucuauaaagcaaug

SEQ ID NO: 18282 - RNA, 23 nt, artificial
  Oligomer
gagguugagcaaauuauccuucu

SEQ ID NO: 18283 - RNA, 23 nt, artificial
  Oligomer
agguugagcaaauuauccuucua

SEQ ID NO: 18284 - RNA, 23 nt, artificial
  Oligomer
gguugagcaaauuauccuucuaa

SEQ ID NO: 18285 - RNA, 23 nt, artificial
  Oligomer
guugagcaaauuauccuucuaau

SEQ ID NO: 18286 - RNA, 23 nt, artificial
  Oligomer
uugagcaaauuauccuucuaaua

SEQ ID NO: 18287 - RNA, 23 nt, artificial
  Oligomer
uucuucuccuuuugccaguagau

SEQ ID NO: 18288 - RNA, 23 nt, artificial
  Oligomer
uagaaacauagucaucacaacug

SEQ ID NO: 18289 - RNA, 23 nt, artificial
  Oligomer
agaaacauagucaucacaacugu

SEQ ID NO: 18290 - RNA, 23 nt, artificial
  Oligomer
gaaacauagucaucacaacuguu

SEQ ID NO: 18291 - RNA, 23 nt, artificial
  Oligomer
aaacauagucaucacaacuguua

SEQ ID NO: 18292 - RNA, 23 nt, artificial
  Oligomer
aacauagucaucacaacuguuac

SEQ ID NO: 18293 - RNA, 23 nt, artificial
  Oligomer
cuaaaggcuuuaaaucccagcca

SEQ ID NO: 18294 - RNA, 23 nt, artificial
  Oligomer
uaaaggcuuuaaaucccagccau

SEQ ID NO: 18295 - RNA, 23 nt, artificial
  Oligomer
aaaggcuuuaaaucccagccaug

SEQ ID NO: 18296 - RNA, 23 nt, artificial
  Oligomer
uuugcuguucaacuccagauuuu

SEQ ID NO: 18297 - RNA, 23 nt, artificial
  Oligomer
uugcuguucaacuccagauuuuc

SEQ ID NO: 18298 - RNA, 23 nt, artificial
  Oligomer
uaccuuagacauuugaagauagc

SEQ ID NO: 18299 - RNA, 23 nt, artificial
  Oligomer
accuuagacauuugaagauagcu

SEQ ID NO: 18300 - RNA, 23 nt, artificial
  Oligomer
ccuuagacauuugaagauagcuu

SEQ ID NO: 18301 - RNA, 23 nt, artificial
  Oligomer
cuuagacauuugaagauagcuua

SEQ ID NO: 18302 - RNA, 23 nt, artificial
  Oligomer
uuagacauuugaagauagcuuac

SEQ ID NO: 18303 - RNA, 23 nt, artificial
  Oligomer
aagucuuuggacuaucccuuucc

SEQ ID NO: 18304 - RNA, 23 nt, artificial
  Oligomer
agucuuuggacuaucccuuuccu

SEQ ID NO: 18305 - RNA, 23 nt, artificial
  Oligomer
uccuccuucucucucugcaucuu

SEQ ID NO: 18306 - RNA, 23 nt, artificial
  Oligomer
ccuccuucucucucugcaucuug

SEQ ID NO: 18307 - RNA, 23 nt, artificial
  Oligomer
ccacuucugagauguucucuucu

SEQ ID NO: 18308 - RNA, 23 nt, artificial
  Oligomer
cacuucugagauguucucuucuu

SEQ ID NO: 18309 - RNA, 23 nt, artificial
  Oligomer
acuucugagauguucucuucuua

SEQ ID NO: 18310 - RNA, 23 nt, artificial
  Oligomer
cuucugagauguucucuucuuac

SEQ ID NO: 18311 - RNA, 23 nt, artificial
  Oligomer
uucugagauguucucuucuuaca

SEQ ID NO: 18312 - RNA, 23 nt, artificial
  Oligomer
caggaugggagcagguuaucagg

SEQ ID NO: 18313 - RNA, 23 nt, artificial
  Oligomer
aggaugggagcagguuaucagga

SEQ ID NO: 18314 - RNA, 23 nt, artificial
  Oligomer
ggaugggagcagguuaucaggaa

SEQ ID NO: 18315 - RNA, 23 nt, artificial
  Oligomer
gaugggagcagguuaucaggaaa

SEQ ID NO: 18316 - RNA, 23 nt, artificial
  Oligomer
augggagcagguuaucaggaaaa

SEQ ID NO: 18317 - RNA, 23 nt, artificial
  Oligomer
gaucuugggaaacuguuguguug

SEQ ID NO: 18318 - RNA, 23 nt, artificial
  Oligomer
aucuugggaaacuguuguguuga

SEQ ID NO: 18319 - RNA, 23 nt, artificial
  Oligomer
ucuugggaaacuguuguguugau

SEQ ID NO: 18320 - RNA, 23 nt, artificial
  Oligomer
cuugggaaacuguuguguugaug

SEQ ID NO: 18321 - RNA, 23 nt, artificial
  Oligomer
uugggaaacuguuguguugaugg

SEQ ID NO: 18322 - RNA, 23 nt, artificial
  Oligomer
aauuucaaagucagauauacuag

SEQ ID NO: 18323 - RNA, 23 nt, artificial
  Oligomer
auuucaaagucagauauacuagg

SEQ ID NO: 18324 - RNA, 23 nt, artificial
  Oligomer
uuucaaagucagauauacuaggu

SEQ ID NO: 18325 - RNA, 23 nt, artificial
  Oligomer
uucaaagucagauauacuaggug

SEQ ID NO: 18326 - RNA, 23 nt, artificial
  Oligomer
ucaaagucagauauacuaggugu

SEQ ID NO: 18327 - RNA, 23 nt, artificial
  Oligomer
cauacuucagaacaacacacucg

SEQ ID NO: 18328 - RNA, 23 nt, artificial
  Oligomer
uagugauaucaaagaugguccgg

SEQ ID NO: 18329 - RNA, 23 nt, artificial
  Oligomer
agugauaucaaagaugguccggu

SEQ ID NO: 18330 - RNA, 23 nt, artificial
  Oligomer
gugauaucaaagaugguccgguu

SEQ ID NO: 18331 - RNA, 23 nt, artificial
  Oligomer
aucuucagagaggcgacauuucc

SEQ ID NO: 18332 - RNA, 23 nt, artificial
  Oligomer
ucuucagagaggcgacauuuccc

SEQ ID NO: 18333 - RNA, 23 nt, artificial
  Oligomer
cuucagagaggcgacauuucccc

SEQ ID NO: 18334 - RNA, 23 nt, artificial
  Oligomer
uucagagaggcgacauuuccccu

SEQ ID NO: 18335 - RNA, 23 nt, artificial
  Oligomer
ucagagaggcgacauuuccccuu

SEQ ID NO: 18336 - RNA, 23 nt, artificial
  Oligomer
ggacacuuggauggugauguucc

SEQ ID NO: 18337 - RNA, 23 nt, artificial
  Oligomer
gacacuuggauggugauguuccc

SEQ ID NO: 18338 - RNA, 23 nt, artificial
  Oligomer
ugcucacguagaagacccuccag

SEQ ID NO: 18339 - RNA, 23 nt, artificial
  Oligomer
gcucacguagaagacccuccagu

SEQ ID NO: 18340 - RNA, 23 nt, artificial
  Oligomer
cucacguagaagacccuccagug

SEQ ID NO: 18341 - RNA, 23 nt, artificial
  Oligomer
ucacguagaagacccuccaguga

SEQ ID NO: 18342 - RNA, 23 nt, artificial
  Oligomer
ugguguuagaccucucugcccua

SEQ ID NO: 18343 - RNA, 23 nt, artificial
  Oligomer
gguguuagaccucucugcccuac

SEQ ID NO: 18344 - RNA, 23 nt, artificial
  Oligomer
guguuagaccucucugcccuaca

SEQ ID NO: 18345 - RNA, 23 nt, artificial
  Oligomer
uguuagaccucucugcccuacac

SEQ ID NO: 18346 - RNA, 23 nt, artificial
  Oligomer
agcauagugagguagcuaaagcc

SEQ ID NO: 18347 - RNA, 23 nt, artificial
  Oligomer
gcauagugagguagcuaaagcca

SEQ ID NO: 18348 - RNA, 23 nt, artificial
  Oligomer
cauagugagguagcuaaagccau

SEQ ID NO: 18349 - RNA, 23 nt, artificial
  Oligomer
auagugagguagcuaaagccaug

SEQ ID NO: 18350 - RNA, 23 nt, artificial
  Oligomer
uagugagguagcuaaagccaugg

SEQ ID NO: 18351 - RNA, 23 nt, artificial
  Oligomer
uugagaaauguugucuucuuuug

SEQ ID NO: 18352 - RNA, 23 nt, artificial
  Oligomer
auguuuacaaaacacacagagau

SEQ ID NO: 18353 - RNA, 23 nt, artificial
  Oligomer
uguuuacaaaacacacagagauu

SEQ ID NO: 18354 - RNA, 23 nt, artificial
  Oligomer
guuuacaaaacacacagagauug

SEQ ID NO: 18355 - RNA, 23 nt, artificial
  Oligomer
uuuacaaaacacacagagauugg

SEQ ID NO: 18356 - RNA, 23 nt, artificial
  Oligomer
uuacaaaacacacagagauugga

SEQ ID NO: 18357 - RNA, 23 nt, artificial
  Oligomer
gcaguuuuagagaaaggagucau

SEQ ID NO: 18358 - RNA, 23 nt, artificial
  Oligomer
ggguguuccugggucuccaaagg

SEQ ID NO: 18359 - RNA, 23 nt, artificial
  Oligomer
gguguuccugggucuccaaaggu

SEQ ID NO: 18360 - RNA, 23 nt, artificial
  Oligomer
guguuccugggucuccaaagguu

SEQ ID NO: 18361 - RNA, 23 nt, artificial
  Oligomer
uguuccugggucuccaaagguug

SEQ ID NO: 18362 - RNA, 23 nt, artificial
  Oligomer
uuccuccuugacuacugcuuuga

SEQ ID NO: 18363 - RNA, 23 nt, artificial
  Oligomer
accuaaaucauucgucuuacaug

SEQ ID NO: 18364 - RNA, 23 nt, artificial
  Oligomer
ccuaaaucauucgucuuacaugu

SEQ ID NO: 18365 - RNA, 23 nt, artificial
  Oligomer
cuaaaucauucgucuuacauguc

SEQ ID NO: 18366 - RNA, 23 nt, artificial
  Oligomer
uaaaucauucgucuuacauguca

SEQ ID NO: 18367 - RNA, 23 nt, artificial
  Oligomer
aaaucauucgucuuacaugucag

SEQ ID NO: 18368 - RNA, 23 nt, artificial
  Oligomer
auauuuccauuagucuccuaaag

SEQ ID NO: 18369 - RNA, 23 nt, artificial
  Oligomer
uauuuccauuagucuccuaaaga

SEQ ID NO: 18370 - RNA, 23 nt, artificial
  Oligomer
auuuccauuagucuccuaaagau

SEQ ID NO: 18371 - RNA, 23 nt, artificial
  Oligomer
guggauuuaguuucacagcuugc

SEQ ID NO: 18372 - RNA, 23 nt, artificial
  Oligomer
cagauagucucugaaguugaccu

SEQ ID NO: 18373 - RNA, 23 nt, artificial
  Oligomer
agauagucucugaaguugaccug

SEQ ID NO: 18374 - RNA, 23 nt, artificial
  Oligomer
gauagucucugaaguugaccugu

SEQ ID NO: 18375 - RNA, 23 nt, artificial
  Oligomer
auagucucugaaguugaccuguu

SEQ ID NO: 18376 - RNA, 23 nt, artificial
  Oligomer
uagucucugaaguugaccuguua

SEQ ID NO: 18377 - RNA, 23 nt, artificial
  Oligomer
cauuaauaacacugguauucucu

SEQ ID NO: 18378 - RNA, 23 nt, artificial
  Oligomer
auuaauaacacugguauucucua

SEQ ID NO: 18379 - RNA, 23 nt, artificial
  Oligomer
uuaauaacacugguauucucuaa

SEQ ID NO: 18380 - RNA, 23 nt, artificial
  Oligomer
uaauaacacugguauucucuaaa

SEQ ID NO: 18381 - RNA, 23 nt, artificial
  Oligomer
aauaacacugguauucucuaaag

SEQ ID NO: 18382 - RNA, 23 nt, artificial
  Oligomer
uucucuaaagucccuuccagaac

SEQ ID NO: 18383 - RNA, 23 nt, artificial
  Oligomer
ucccuuccagaacucaagaauuc

SEQ ID NO: 18384 - RNA, 23 nt, artificial
  Oligomer
cccuuccagaacucaagaauucu

SEQ ID NO: 18385 - RNA, 23 nt, artificial
  Oligomer
ccuuccagaacucaagaauucug

SEQ ID NO: 18386 - RNA, 23 nt, artificial
  Oligomer
cuuccagaacucaagaauucugc

SEQ ID NO: 18387 - RNA, 23 nt, artificial
  Oligomer
uuccagaacucaagaauucugca

SEQ ID NO: 18388 - RNA, 23 nt, artificial
  Oligomer
caccuugaucaaggucaccagag

SEQ ID NO: 18389 - RNA, 23 nt, artificial
  Oligomer
accuugaucaaggucaccagagc

SEQ ID NO: 18390 - RNA, 23 nt, artificial
  Oligomer
ccuugaucaaggucaccagagcu

SEQ ID NO: 18391 - RNA, 23 nt, artificial
  Oligomer
cuugaucaaggucaccagagcua

SEQ ID NO: 18392 - RNA, 23 nt, artificial
  Oligomer
uugaucaaggucaccagagcuac

SEQ ID NO: 18393 - RNA, 23 nt, artificial
  Oligomer
uugguugucauauugaaauccag

SEQ ID NO: 18394 - RNA, 23 nt, artificial
  Oligomer
uaguauugcugacaaaguaucug

SEQ ID NO: 18395 - RNA, 23 nt, artificial
  Oligomer
ugugaagcagcauagugagguag

SEQ ID NO: 18396 - RNA, 23 nt, artificial
  Oligomer
gugaagcagcauagugagguagc

SEQ ID NO: 18397 - RNA, 23 nt, artificial
  Oligomer
ugaagcagcauagugagguagcu

SEQ ID NO: 18398 - RNA, 23 nt, artificial
  Oligomer
ugcuguucaacuccagauuuuca

SEQ ID NO: 18399 - RNA, 23 nt, artificial
  Oligomer
ucucugcugaugucagaaagacc

SEQ ID NO: 18400 - RNA, 23 nt, artificial
  Oligomer
cucugcugaugucagaaagaccc

SEQ ID NO: 18401 - RNA, 23 nt, artificial
  Oligomer
ucugcugaugucagaaagaccca

SEQ ID NO: 18402 - RNA, 23 nt, artificial
  Oligomer
cugcugaugucagaaagacccag

SEQ ID NO: 18403 - RNA, 23 nt, artificial
  Oligomer
ugcugaugucagaaagacccaga

SEQ ID NO: 18404 - RNA, 23 nt, artificial
  Oligomer
cuuacugcuuaguacauacacug

SEQ ID NO: 18405 - RNA, 23 nt, artificial
  Oligomer
uuacugcuuaguacauacacugu

SEQ ID NO: 18406 - RNA, 23 nt, artificial
  Oligomer
uacugcuuaguacauacacugua

SEQ ID NO: 18407 - RNA, 23 nt, artificial
  Oligomer
acugcuuaguacauacacuguaa

SEQ ID NO: 18408 - RNA, 23 nt, artificial
  Oligomer
cugcuuaguacauacacuguaaa

SEQ ID NO: 18409 - RNA, 23 nt, artificial
  Oligomer
uuggauaguucuccuuucugcug

SEQ ID NO: 18410 - RNA, 23 nt, artificial
  Oligomer
aaaauggaauacuggguaaacac

SEQ ID NO: 18411 - RNA, 23 nt, artificial
  Oligomer
aaauggaauacuggguaaacacc

SEQ ID NO: 18412 - RNA, 23 nt, artificial
  Oligomer
aauggaauacuggguaaacacca

SEQ ID NO: 18413 - RNA, 23 nt, artificial
  Oligomer
auggaauacuggguaaacaccaa

SEQ ID NO: 18414 - RNA, 23 nt, artificial
  Oligomer
uggaauacuggguaaacaccaau

SEQ ID NO: 18415 - RNA, 23 nt, artificial
  Oligomer
uguucaugccauacuuccuaugc

SEQ ID NO: 18416 - RNA, 23 nt, artificial
  Oligomer
uuuguaaacagcagcauaaaauc

SEQ ID NO: 18417 - RNA, 23 nt, artificial
  Oligomer
uuguaaacagcagcauaaaaucu

SEQ ID NO: 18418 - RNA, 23 nt, artificial
  Oligomer
uguaaacagcagcauaaaaucuu

SEQ ID NO: 18419 - RNA, 23 nt, artificial
  Oligomer
guaaacagcagcauaaaaucuuc

SEQ ID NO: 18420 - RNA, 23 nt, artificial
  Oligomer
uaaacagcagcauaaaaucuucu

SEQ ID NO: 18421 - RNA, 23 nt, artificial
  Oligomer
aaaaucuucuacucugacauuag

SEQ ID NO: 18422 - RNA, 23 nt, artificial
  Oligomer
aaaucuucuacucugacauuagg

SEQ ID NO: 18423 - RNA, 23 nt, artificial
  Oligomer
cuacuuccagcagcacuuugccu

SEQ ID NO: 18424 - RNA, 23 nt, artificial
  Oligomer
uacuuccagcagcacuuugccug

SEQ ID NO: 18425 - RNA, 23 nt, artificial
  Oligomer
ucucuaaagucccuuccagaacu

SEQ ID NO: 18426 - RNA, 23 nt, artificial
  Oligomer
cucuaaagucccuuccagaacuc

SEQ ID NO: 18427 - RNA, 23 nt, artificial
  Oligomer
ucuaaagucccuuccagaacuca

SEQ ID NO: 18428 - RNA, 23 nt, artificial
  Oligomer
cuaaagucccuuccagaacucaa

SEQ ID NO: 18429 - RNA, 23 nt, artificial
  Oligomer
uaaagucccuuccagaacucaag

SEQ ID NO: 18430 - RNA, 23 nt, artificial
  Oligomer
gauaacgucacuucagccaggug

SEQ ID NO: 18431 - RNA, 23 nt, artificial
  Oligomer
auaacgucacuucagccaggugu

SEQ ID NO: 18432 - RNA, 23 nt, artificial
  Oligomer
gauaucaaagaugguccgguucu

SEQ ID NO: 18433 - RNA, 23 nt, artificial
  Oligomer
auaucaaagaugguccgguucuu

SEQ ID NO: 18434 - RNA, 23 nt, artificial
  Oligomer
uaucaaagaugguccgguucuug

SEQ ID NO: 18435 - RNA, 23 nt, artificial
  Oligomer
aucaaagaugguccgguucuugu

SEQ ID NO: 18436 - RNA, 23 nt, artificial
  Oligomer
ucaaagaugguccgguucuugua

SEQ ID NO: 18437 - RNA, 23 nt, artificial
  Oligomer
uagucagcaccauuuucuucucc

SEQ ID NO: 18438 - RNA, 23 nt, artificial
  Oligomer
agucagcaccauuuucuucuccu

SEQ ID NO: 18439 - RNA, 23 nt, artificial
  Oligomer
gucagcaccauuuucuucuccuu

SEQ ID NO: 18440 - RNA, 23 nt, artificial
  Oligomer
uuccuuggucacguggauaacac

SEQ ID NO: 18441 - RNA, 23 nt, artificial
  Oligomer
uccuuggucacguggauaacacc

SEQ ID NO: 18442 - RNA, 23 nt, artificial
  Oligomer
ccuuggucacguggauaacaccu

SEQ ID NO: 18443 - RNA, 23 nt, artificial
  Oligomer
cuuggucacguggauaacaccug

SEQ ID NO: 18444 - RNA, 23 nt, artificial
  Oligomer
uuggucacguggauaacaccuga

SEQ ID NO: 18445 - RNA, 23 nt, artificial
  Oligomer
agggucaaaagugaaagccaaca

SEQ ID NO: 18446 - RNA, 23 nt, artificial
  Oligomer
gggucaaaagugaaagccaacaa

SEQ ID NO: 18447 - RNA, 23 nt, artificial
  Oligomer
ggucaaaagugaaagccaacaau

SEQ ID NO: 18448 - RNA, 23 nt, artificial
  Oligomer
gucaaaagugaaagccaacaauu

SEQ ID NO: 18449 - RNA, 23 nt, artificial
  Oligomer
ucaaaagugaaagccaacaauuu

SEQ ID NO: 18450 - RNA, 23 nt, artificial
  Oligomer
acauagucaucacaacuguuacu

SEQ ID NO: 18451 - RNA, 23 nt, artificial
  Oligomer
cauagucaucacaacuguuacua

SEQ ID NO: 18452 - RNA, 23 nt, artificial
  Oligomer
auagucaucacaacuguuacuaa

SEQ ID NO: 18453 - RNA, 23 nt, artificial
  Oligomer
uagucaucacaacuguuacuaaa

SEQ ID NO: 18454 - RNA, 23 nt, artificial
  Oligomer
aaugugauuaucccagcuuaagu

SEQ ID NO: 18455 - RNA, 23 nt, artificial
  Oligomer
augugauuaucccagcuuaaguu

SEQ ID NO: 18456 - RNA, 23 nt, artificial
  Oligomer
ugugauuaucccagcuuaaguug

SEQ ID NO: 18457 - RNA, 23 nt, artificial
  Oligomer
gugauuaucccagcuuaaguugc

SEQ ID NO: 18458 - RNA, 23 nt, artificial
  Oligomer
ugauuaucccagcuuaaguugcg

SEQ ID NO: 18459 - RNA, 23 nt, artificial
  Oligomer
ucuggucuagugaauuguggaag

SEQ ID NO: 18460 - RNA, 23 nt, artificial
  Oligomer
gcaguuggcuaugucuuuccagu

SEQ ID NO: 18461 - RNA, 23 nt, artificial
  Oligomer
caguuggcuaugucuuuccaguu

SEQ ID NO: 18462 - RNA, 23 nt, artificial
  Oligomer
aguuggcuaugucuuuccaguuc

SEQ ID NO: 18463 - RNA, 23 nt, artificial
  Oligomer
guuggcuaugucuuuccaguucu

SEQ ID NO: 18464 - RNA, 23 nt, artificial
  Oligomer
uuggcuaugucuuuccaguucuc

SEQ ID NO: 18465 - RNA, 23 nt, artificial
  Oligomer
uugaagauagcuuacugcuuagu

SEQ ID NO: 18466 - RNA, 23 nt, artificial
  Oligomer
cagaggaaauuaguuuuggauag

SEQ ID NO: 18467 - RNA, 23 nt, artificial
  Oligomer
agaggaaauuaguuuuggauagu

SEQ ID NO: 18468 - RNA, 23 nt, artificial
  Oligomer
gaggaaauuaguuuuggauaguu

SEQ ID NO: 18469 - RNA, 23 nt, artificial
  Oligomer
aggaaauuaguuuuggauaguuc

SEQ ID NO: 18470 - RNA, 23 nt, artificial
  Oligomer
ggaaauuaguuuuggauaguucu

SEQ ID NO: 18471 - RNA, 23 nt, artificial
  Oligomer
ucuccuuucugcuguaccucaug

SEQ ID NO: 18472 - RNA, 23 nt, artificial
  Oligomer
cuccuuucugcuguaccucaugg

SEQ ID NO: 18473 - RNA, 23 nt, artificial
  Oligomer
uccuuucugcuguaccucauggg

SEQ ID NO: 18474 - RNA, 23 nt, artificial
  Oligomer
ccuuucugcuguaccucaugggg

SEQ ID NO: 18475 - RNA, 23 nt, artificial
  Oligomer
cuuucugcuguaccucauggggg

SEQ ID NO: 18476 - RNA, 23 nt, artificial
  Oligomer
uuucugcuguaccucauggggga

SEQ ID NO: 18477 - RNA, 23 nt, artificial
  Oligomer
aaugaaaaaaauggaauacuggg

SEQ ID NO: 18478 - RNA, 23 nt, artificial
  Oligomer
augaaaaaaauggaauacugggu

SEQ ID NO: 18479 - RNA, 23 nt, artificial
  Oligomer
ugaaaaaaauggaauacugggua

SEQ ID NO: 18480 - RNA, 23 nt, artificial
  Oligomer
gaaaaaaauggaauacuggguaa

SEQ ID NO: 18481 - RNA, 23 nt, artificial
  Oligomer
aaaaaaauggaauacuggguaaa

SEQ ID NO: 18482 - RNA, 23 nt, artificial
  Oligomer
uuagucuccuaaagauguucaug

SEQ ID NO: 18483 - RNA, 23 nt, artificial
  Oligomer
ugcugaagaaaaauuccacuuuu

SEQ ID NO: 18484 - RNA, 23 nt, artificial
  Oligomer
gaguuaggaaaucuggguucugg

SEQ ID NO: 18485 - RNA, 23 nt, artificial
  Oligomer
aguuaggaaaucuggguucuggc

SEQ ID NO: 18486 - RNA, 23 nt, artificial
  Oligomer
guuaggaaaucuggguucuggcg

SEQ ID NO: 18487 - RNA, 23 nt, artificial
  Oligomer
uuaggaaaucuggguucuggcgc

SEQ ID NO: 18488 - RNA, 23 nt, artificial
  Oligomer
uaggaaaucuggguucuggcgcu

SEQ ID NO: 18489 - RNA, 23 nt, artificial
  Oligomer
cugugcccaccauauuccucuag

SEQ ID NO: 18490 - RNA, 23 nt, artificial
  Oligomer
ugugcccaccauauuccucuaga

SEQ ID NO: 18491 - RNA, 23 nt, artificial
  Oligomer
aaguucccagaagaggucaauug

SEQ ID NO: 18492 - RNA, 23 nt, artificial
  Oligomer
aguucccagaagaggucaauugc

SEQ ID NO: 18493 - RNA, 23 nt, artificial
  Oligomer
guucccagaagaggucaauugca

SEQ ID NO: 18494 - RNA, 23 nt, artificial
  Oligomer
uucccagaagaggucaauugcaa

SEQ ID NO: 18495 - RNA, 23 nt, artificial
  Oligomer
ucccagaagaggucaauugcaaa

SEQ ID NO: 18496 - RNA, 23 nt, artificial
  Oligomer
uguacucgggccauauauucaug

SEQ ID NO: 18497 - RNA, 23 nt, artificial
  Oligomer
guacucgggccauauauucaugu

SEQ ID NO: 18498 - RNA, 23 nt, artificial
  Oligomer
uacucgggccauauauucauguc

SEQ ID NO: 18499 - RNA, 23 nt, artificial
  Oligomer
ucuucuccuuuugccaguagaug

SEQ ID NO: 18500 - RNA, 23 nt, artificial
  Oligomer
ccugaacagaagugagaaagacc

SEQ ID NO: 18501 - RNA, 23 nt, artificial
  Oligomer
cugaacagaagugagaaagacca

SEQ ID NO: 18502 - RNA, 23 nt, artificial
  Oligomer
ugaacagaagugagaaagaccag

SEQ ID NO: 18503 - RNA, 23 nt, artificial
  Oligomer
gaacagaagugagaaagaccagc

SEQ ID NO: 18504 - RNA, 23 nt, artificial
  Oligomer
aacagaagugagaaagaccagcc

SEQ ID NO: 18505 - RNA, 23 nt, artificial
  Oligomer
uaacuucuguuacuuuacagagg

SEQ ID NO: 18506 - RNA, 23 nt, artificial
  Oligomer
aacuucuguuacuuuacagaggg

SEQ ID NO: 18507 - RNA, 23 nt, artificial
  Oligomer
acuucuguuacuuuacagagggu

SEQ ID NO: 18508 - RNA, 23 nt, artificial
  Oligomer
cuucuguuacuuuacagaggguu

SEQ ID NO: 18509 - RNA, 23 nt, artificial
  Oligomer
uucuguuacuuuacagaggguuu

SEQ ID NO: 18510 - RNA, 23 nt, artificial
  Oligomer
ugacaauccaauugcucacguag

SEQ ID NO: 18511 - RNA, 23 nt, artificial
  Oligomer
gacaauccaauugcucacguaga

SEQ ID NO: 18512 - RNA, 23 nt, artificial
  Oligomer
acaauccaauugcucacguagaa

SEQ ID NO: 18513 - RNA, 23 nt, artificial
  Oligomer
caauccaauugcucacguagaag

SEQ ID NO: 18514 - RNA, 23 nt, artificial
  Oligomer
aauccaauugcucacguagaaga

SEQ ID NO: 18515 - RNA, 23 nt, artificial
  Oligomer
ugauaaugugauuaucccagcuu

SEQ ID NO: 18516 - RNA, 23 nt, artificial
  Oligomer
gauaaugugauuaucccagcuua

SEQ ID NO: 18517 - RNA, 23 nt, artificial
  Oligomer
auaaugugauuaucccagcuuaa

SEQ ID NO: 18518 - RNA, 23 nt, artificial
  Oligomer
gauuaucccagcuuaaguugcgu

SEQ ID NO: 18519 - RNA, 23 nt, artificial
  Oligomer
auuaucccagcuuaaguugcguc

SEQ ID NO: 18520 - RNA, 23 nt, artificial
  Oligomer
uuaucccagcuuaaguugcgucc

SEQ ID NO: 18521 - RNA, 23 nt, artificial
  Oligomer
uaucccagcuuaaguugcgucca

SEQ ID NO: 18522 - RNA, 23 nt, artificial
  Oligomer
ugaauuguggaaggcaguuuuag

SEQ ID NO: 18523 - RNA, 23 nt, artificial
  Oligomer
gaauuguggaaggcaguuuuaga

SEQ ID NO: 18524 - RNA, 23 nt, artificial
  Oligomer
aauuguggaaggcaguuuuagag

SEQ ID NO: 18525 - RNA, 23 nt, artificial
  Oligomer
auuguggaaggcaguuuuagaga

SEQ ID NO: 18526 - RNA, 23 nt, artificial
  Oligomer
uuguggaaggcaguuuuagagaa

SEQ ID NO: 18527 - RNA, 23 nt, artificial
  Oligomer
ccuccuugacuacugcuuugacg

SEQ ID NO: 18528 - RNA, 23 nt, artificial
  Oligomer
cugcuuugacguaccuaaaucau

SEQ ID NO: 18529 - RNA, 23 nt, artificial
  Oligomer
gggcuuuuguaaacagcagcaua

SEQ ID NO: 18530 - RNA, 23 nt, artificial
  Oligomer
ggcuuuuguaaacagcagcauaa

SEQ ID NO: 18531 - RNA, 23 nt, artificial
  Oligomer
gcuuuuguaaacagcagcauaaa

SEQ ID NO: 18532 - RNA, 23 nt, artificial
  Oligomer
cuuuuguaaacagcagcauaaaa

SEQ ID NO: 18533 - RNA, 23 nt, artificial
  Oligomer
uuuuguaaacagcagcauaaaau

SEQ ID NO: 18534 - RNA, 23 nt, artificial
  Oligomer
agcauaaaaucuucuacucugac

SEQ ID NO: 18535 - RNA, 23 nt, artificial
  Oligomer
gcauaaaaucuucuacucugaca

SEQ ID NO: 18536 - RNA, 23 nt, artificial
  Oligomer
cauaaaaucuucuacucugacau

SEQ ID NO: 18537 - RNA, 23 nt, artificial
  Oligomer
auaaaaucuucuacucugacauu

SEQ ID NO: 18538 - RNA, 23 nt, artificial
  Oligomer
uaaaaucuucuacucugacauua

SEQ ID NO: 18539 - RNA, 23 nt, artificial
  Oligomer
auaauucgggucaccucccuggg

SEQ ID NO: 18540 - RNA, 23 nt, artificial
  Oligomer
aagaauucugcauuucaaaacac

SEQ ID NO: 18541 - RNA, 23 nt, artificial
  Oligomer
gagcuacuucugugcccaccaua

SEQ ID NO: 18542 - RNA, 23 nt, artificial
  Oligomer
agcuacuucugugcccaccauau

SEQ ID NO: 18543 - RNA, 23 nt, artificial
  Oligomer
gcuacuucugugcccaccauauu

SEQ ID NO: 18544 - RNA, 23 nt, artificial
  Oligomer
cugauucacucuuaaauguccau

SEQ ID NO: 18545 - RNA, 23 nt, artificial
  Oligomer
ugauucacucuuaaauguccaua

SEQ ID NO: 18546 - RNA, 23 nt, artificial
  Oligomer
auacuagguguagggaagucagc

SEQ ID NO: 18547 - RNA, 23 nt, artificial
  Oligomer
uacuagguguagggaagucagcu

SEQ ID NO: 18548 - RNA, 23 nt, artificial
  Oligomer
acuagguguagggaagucagcuu

SEQ ID NO: 18549 - RNA, 23 nt, artificial
  Oligomer
cuagguguagggaagucagcuuu

SEQ ID NO: 18550 - RNA, 23 nt, artificial
  Oligomer
uagguguagggaagucagcuuug

SEQ ID NO: 18551 - RNA, 23 nt, artificial
  Oligomer
agcuuugacugauaacgucacuu

SEQ ID NO: 18552 - RNA, 23 nt, artificial
  Oligomer
gcuuugacugauaacgucacuuc

SEQ ID NO: 18553 - RNA, 23 nt, artificial
  Oligomer
cuuugacugauaacgucacuuca

SEQ ID NO: 18554 - RNA, 23 nt, artificial
  Oligomer
uuugacugauaacgucacuucag

SEQ ID NO: 18555 - RNA, 23 nt, artificial
  Oligomer
uugacugauaacgucacuucagc

SEQ ID NO: 18556 - RNA, 23 nt, artificial
  Oligomer
ucacaauggagagguuauuagug

SEQ ID NO: 18557 - RNA, 23 nt, artificial
  Oligomer
cacaauggagagguuauuaguga

SEQ ID NO: 18558 - RNA, 23 nt, artificial
  Oligomer
acaauggagagguuauuagugau

SEQ ID NO: 18559 - RNA, 23 nt, artificial
  Oligomer
caauggagagguuauuagugaua

SEQ ID NO: 18560 - RNA, 23 nt, artificial
  Oligomer
aauggagagguuauuagugauau

SEQ ID NO: 18561 - RNA, 23 nt, artificial
  Oligomer
aaucuucagagaggcgacauuuc

SEQ ID NO: 18562 - RNA, 23 nt, artificial
  Oligomer
cagaaauaccaaggagaaaaagc

SEQ ID NO: 18563 - RNA, 23 nt, artificial
  Oligomer
uaugaaccaguuaagucuuugga

SEQ ID NO: 18564 - RNA, 23 nt, artificial
  Oligomer
augaaccaguuaagucuuuggac

SEQ ID NO: 18565 - RNA, 23 nt, artificial
  Oligomer
ugaaccaguuaagucuuuggacu

SEQ ID NO: 18566 - RNA, 23 nt, artificial
  Oligomer
ggacuaucccuuuccuccuugac

SEQ ID NO: 18567 - RNA, 23 nt, artificial
  Oligomer
uccuccuugacuacugcuuugac

SEQ ID NO: 18568 - RNA, 23 nt, artificial
  Oligomer
cgucuuacaugucagaggaaauu

SEQ ID NO: 18569 - RNA, 23 nt, artificial
  Oligomer
gucuuacaugucagaggaaauua

SEQ ID NO: 18570 - RNA, 23 nt, artificial
  Oligomer
ucuuacaugucagaggaaauuag

SEQ ID NO: 18571 - RNA, 23 nt, artificial
  Oligomer
cuuacaugucagaggaaauuagu

SEQ ID NO: 18572 - RNA, 23 nt, artificial
  Oligomer
uuacaugucagaggaaauuaguu

SEQ ID NO: 18573 - RNA, 23 nt, artificial
  Oligomer
uuuccauuagucuccuaaagaug

SEQ ID NO: 18574 - RNA, 23 nt, artificial
  Oligomer
uuccauuagucuccuaaagaugu

SEQ ID NO: 18575 - RNA, 23 nt, artificial
  Oligomer
uccauuagucuccuaaagauguu

SEQ ID NO: 18576 - RNA, 23 nt, artificial
  Oligomer
ccauuagucuccuaaagauguuc

SEQ ID NO: 18577 - RNA, 23 nt, artificial
  Oligomer
cauuagucuccuaaagauguuca

SEQ ID NO: 18578 - RNA, 23 nt, artificial
  Oligomer
auuagucuccuaaagauguucau

SEQ ID NO: 18579 - RNA, 23 nt, artificial
  Oligomer
uugccugacauauauauguauau

SEQ ID NO: 18580 - RNA, 23 nt, artificial
  Oligomer
uaacacugguauucucuaaaguc

SEQ ID NO: 18581 - RNA, 23 nt, artificial
  Oligomer
aacacugguauucucuaaagucc

SEQ ID NO: 18582 - RNA, 23 nt, artificial
  Oligomer
gcccaccauauuccucuagacac

SEQ ID NO: 18583 - RNA, 23 nt, artificial
  Oligomer
cccaccauauuccucuagacacu

SEQ ID NO: 18584 - RNA, 23 nt, artificial
  Oligomer
ccaccauauuccucuagacacuu

SEQ ID NO: 18585 - RNA, 23 nt, artificial
  Oligomer
caccauauuccucuagacacuuc

SEQ ID NO: 18586 - RNA, 23 nt, artificial
  Oligomer
ugauaucaaagaugguccgguuc

SEQ ID NO: 18587 - RNA, 23 nt, artificial
  Oligomer
cuucccuuaguauugcugacaaa

SEQ ID NO: 18588 - RNA, 23 nt, artificial
  Oligomer
uucccuuaguauugcugacaaag

SEQ ID NO: 18589 - RNA, 23 nt, artificial
  Oligomer
ucccuuaguauugcugacaaagu

SEQ ID NO: 18590 - RNA, 23 nt, artificial
  Oligomer
gucaauacgggaaacacugcuag

SEQ ID NO: 18591 - RNA, 23 nt, artificial
  Oligomer
ucaauacgggaaacacugcuagu

SEQ ID NO: 18592 - RNA, 23 nt, artificial
  Oligomer
caauacgggaaacacugcuagua

SEQ ID NO: 18593 - RNA, 23 nt, artificial
  Oligomer
aauacgggaaacacugcuaguac

SEQ ID NO: 18594 - RNA, 23 nt, artificial
  Oligomer
auacgggaaacacugcuaguacc

SEQ ID NO: 18595 - RNA, 23 nt, artificial
  Oligomer
ugucagaaagacccagaaauacc

SEQ ID NO: 18596 - RNA, 23 nt, artificial
  Oligomer
gucagaaagacccagaaauacca

SEQ ID NO: 18597 - RNA, 23 nt, artificial
  Oligomer
ucagaaagacccagaaauaccaa

SEQ ID NO: 18598 - RNA, 23 nt, artificial
  Oligomer
cagaaagacccagaaauaccaag

SEQ ID NO: 18599 - RNA, 23 nt, artificial
  Oligomer
agaaagacccagaaauaccaagg

SEQ ID NO: 18600 - RNA, 23 nt, artificial
  Oligomer
agggaucuaaggaggcccuaugg

SEQ ID NO: 18601 - RNA, 23 nt, artificial
  Oligomer
gggaucuaaggaggcccuaugga

SEQ ID NO: 18602 - RNA, 23 nt, artificial
  Oligomer
ggaucuaaggaggcccuauggaa

SEQ ID NO: 18603 - RNA, 23 nt, artificial
  Oligomer
gaucuaaggaggcccuauggaaa

SEQ ID NO: 18604 - RNA, 23 nt, artificial
  Oligomer
aucuaaggaggcccuauggaaag

SEQ ID NO: 18605 - RNA, 23 nt, artificial
  Oligomer
ucaguccaauaugaaccaguuaa

SEQ ID NO: 18606 - RNA, 23 nt, artificial
  Oligomer
caguccaauaugaaccaguuaag

SEQ ID NO: 18607 - RNA, 23 nt, artificial
  Oligomer
aguccaauaugaaccaguuaagu

SEQ ID NO: 18608 - RNA, 23 nt, artificial
  Oligomer
guccaauaugaaccaguuaaguc

SEQ ID NO: 18609 - RNA, 23 nt, artificial
  Oligomer
guauauaccaguuaacaggccac

SEQ ID NO: 18610 - RNA, 23 nt, artificial
  Oligomer
agcaacugaagugaagaagcacc

SEQ ID NO: 18611 - RNA, 23 nt, artificial
  Oligomer
gcaacugaagugaagaagcaccu

SEQ ID NO: 18612 - RNA, 23 nt, artificial
  Oligomer
caacugaagugaagaagcaccua

SEQ ID NO: 18613 - RNA, 23 nt, artificial
  Oligomer
aacugaagugaagaagcaccuaa

SEQ ID NO: 18614 - RNA, 23 nt, artificial
  Oligomer
acugaagugaagaagcaccuaag

SEQ ID NO: 18615 - RNA, 23 nt, artificial
  Oligomer
uaucaggaaaaugcucuugcuug

SEQ ID NO: 18616 - RNA, 23 nt, artificial
  Oligomer
aucaggaaaaugcucuugcuugg

SEQ ID NO: 18617 - RNA, 23 nt, artificial
  Oligomer
ucaggaaaaugcucuugcuuggu

SEQ ID NO: 18618 - RNA, 23 nt, artificial
  Oligomer
caggaaaaugcucuugcuugguu

SEQ ID NO: 18619 - RNA, 23 nt, artificial
  Oligomer
aggaaaaugcucuugcuugguug

SEQ ID NO: 18620 - RNA, 23 nt, artificial
  Oligomer
cagcauagagcucaguuucagga

SEQ ID NO: 18621 - RNA, 23 nt, artificial
  Oligomer
agcauagagcucaguuucaggau

SEQ ID NO: 18622 - RNA, 23 nt, artificial
  Oligomer
gcauagagcucaguuucaggauc

SEQ ID NO: 18623 - RNA, 23 nt, artificial
  Oligomer
cauagagcucaguuucaggaucu

SEQ ID NO: 18624 - RNA, 23 nt, artificial
  Oligomer
auagagcucaguuucaggaucuu

SEQ ID NO: 18625 - RNA, 23 nt, artificial
  Oligomer
aaguuggaauuucaaagucagau

SEQ ID NO: 18626 - RNA, 23 nt, artificial
  Oligomer
aguuggaauuucaaagucagaua

SEQ ID NO: 18627 - RNA, 23 nt, artificial
  Oligomer
guuggaauuucaaagucagauau

SEQ ID NO: 18628 - RNA, 23 nt, artificial
  Oligomer
uuggaauuucaaagucagauaua

SEQ ID NO: 18629 - RNA, 23 nt, artificial
  Oligomer
uggaauuucaaagucagauauac

SEQ ID NO: 18630 - RNA, 23 nt, artificial
  Oligomer
cccaaguaagaccagggcacuuc

SEQ ID NO: 18631 - RNA, 23 nt, artificial
  Oligomer
ccaaguaagaccagggcacuucc

SEQ ID NO: 18632 - RNA, 23 nt, artificial
  Oligomer
caaguaagaccagggcacuuccc

SEQ ID NO: 18633 - RNA, 23 nt, artificial
  Oligomer
aaguaagaccagggcacuuccca

SEQ ID NO: 18634 - RNA, 23 nt, artificial
  Oligomer
aguaagaccagggcacuucccag

SEQ ID NO: 18635 - RNA, 23 nt, artificial
  Oligomer
aaguaucugcuguagaauacagg

SEQ ID NO: 18636 - RNA, 23 nt, artificial
  Oligomer
aguaucugcuguagaauacagga

SEQ ID NO: 18637 - RNA, 23 nt, artificial
  Oligomer
guaucugcuguagaauacaggaa

SEQ ID NO: 18638 - RNA, 23 nt, artificial
  Oligomer
uaucugcuguagaauacaggaau

SEQ ID NO: 18639 - RNA, 23 nt, artificial
  Oligomer
aucugcuguagaauacaggaauu

SEQ ID NO: 18640 - RNA, 23 nt, artificial
  Oligomer
auaguuuuacacaggagcaaggu

SEQ ID NO: 18641 - RNA, 23 nt, artificial
  Oligomer
uaguuuuacacaggagcaagguu

SEQ ID NO: 18642 - RNA, 23 nt, artificial
  Oligomer
aaucauucgucuuacaugucaga

SEQ ID NO: 18643 - RNA, 23 nt, artificial
  Oligomer
uacaugucagaggaaauuaguuu

SEQ ID NO: 18644 - RNA, 23 nt, artificial
  Oligomer
acaugucagaggaaauuaguuuu

SEQ ID NO: 18645 - RNA, 23 nt, artificial
  Oligomer
ccaaagguuguggauuuaguuuc

SEQ ID NO: 18646 - RNA, 23 nt, artificial
  Oligomer
caaagguuguggauuuaguuuca

SEQ ID NO: 18647 - RNA, 23 nt, artificial
  Oligomer
aaagguuguggauuuaguuucac

SEQ ID NO: 18648 - RNA, 23 nt, artificial
  Oligomer
aagguuguggauuuaguuucaca

SEQ ID NO: 18649 - RNA, 23 nt, artificial
  Oligomer
augcauuacauugggcuuuugua

SEQ ID NO: 18650 - RNA, 23 nt, artificial
  Oligomer
ugcauuacauugggcuuuuguaa

SEQ ID NO: 18651 - RNA, 23 nt, artificial
  Oligomer
gcauuacauugggcuuuuguaaa

SEQ ID NO: 18652 - RNA, 23 nt, artificial
  Oligomer
cauuacauugggcuuuuguaaac

SEQ ID NO: 18653 - RNA, 23 nt, artificial
  Oligomer
auuacauugggcuuuuguaaaca

SEQ ID NO: 18654 - RNA, 23 nt, artificial
  Oligomer
cuacucugacauuaggaaaucag

SEQ ID NO: 18655 - RNA, 23 nt, artificial
  Oligomer
uacucugacauuaggaaaucaga

SEQ ID NO: 18656 - RNA, 23 nt, artificial
  Oligomer
acucugacauuaggaaaucagau

SEQ ID NO: 18657 - RNA, 23 nt, artificial
  Oligomer
cucugacauuaggaaaucagaua

SEQ ID NO: 18658 - RNA, 23 nt, artificial
  Oligomer
ucugacauuaggaaaucagauag

SEQ ID NO: 18659 - RNA, 23 nt, artificial
  Oligomer
uauauaccaguuaacaggccaca

SEQ ID NO: 18660 - RNA, 23 nt, artificial
  Oligomer
acacuguuauacagggcguacac

SEQ ID NO: 18661 - RNA, 23 nt, artificial
  Oligomer
cacuguuauacagggcguacacu

SEQ ID NO: 18662 - RNA, 23 nt, artificial
  Oligomer
uuaagguaauggcccaggauggg

SEQ ID NO: 18663 - RNA, 23 nt, artificial
  Oligomer
uaagguaauggcccaggauggga

SEQ ID NO: 18664 - RNA, 23 nt, artificial
  Oligomer
aagguaauggcccaggaugggag

SEQ ID NO: 18665 - RNA, 23 nt, artificial
  Oligomer
cuugcuugguuguauuccaguug

SEQ ID NO: 18666 - RNA, 23 nt, artificial
  Oligomer
uugcuugguuguauuccaguuga

SEQ ID NO: 18667 - RNA, 23 nt, artificial
  Oligomer
gauucacucuuaaauguccauac

SEQ ID NO: 18668 - RNA, 23 nt, artificial
  Oligomer
auucacucuuaaauguccauacu

SEQ ID NO: 18669 - RNA, 23 nt, artificial
  Oligomer
uucacucuuaaauguccauacuu

SEQ ID NO: 18670 - RNA, 23 nt, artificial
  Oligomer
gucauauugaaauccaguuugcu

SEQ ID NO: 18671 - RNA, 23 nt, artificial
  Oligomer
ucuuacagucuauaaagcaauga

SEQ ID NO: 18672 - RNA, 23 nt, artificial
  Oligomer
uaacgucacuucagccagguguu

SEQ ID NO: 18673 - RNA, 23 nt, artificial
  Oligomer
ugcgaguuugugccagcucuuca

SEQ ID NO: 18674 - RNA, 23 nt, artificial
  Oligomer
gcgaguuugugccagcucuucaa

SEQ ID NO: 18675 - RNA, 23 nt, artificial
  Oligomer
ucaacagaaacauugugaccaca

SEQ ID NO: 18676 - RNA, 23 nt, artificial
  Oligomer
caacagaaacauugugaccacag

SEQ ID NO: 18677 - RNA, 23 nt, artificial
  Oligomer
aacagaaacauugugaccacagg

SEQ ID NO: 18678 - RNA, 23 nt, artificial
  Oligomer
uaaagaaacgguucaacuuuguu

SEQ ID NO: 18679 - RNA, 23 nt, artificial
  Oligomer
cccuuaguauugcugacaaagua

SEQ ID NO: 18680 - RNA, 23 nt, artificial
  Oligomer
ccuuaguauugcugacaaaguau

SEQ ID NO: 18681 - RNA, 23 nt, artificial
  Oligomer
cuuaguauugcugacaaaguauc

SEQ ID NO: 18682 - RNA, 23 nt, artificial
  Oligomer
uuaguauugcugacaaaguaucu

SEQ ID NO: 18683 - RNA, 23 nt, artificial
  Oligomer
ccagcuuaaguugcguccacuuc

SEQ ID NO: 18684 - RNA, 23 nt, artificial
  Oligomer
gauguuuacaaaacacacagaga

SEQ ID NO: 18685 - RNA, 23 nt, artificial
  Oligomer
uuacuaccuuagacauuugaaga

SEQ ID NO: 18686 - RNA, 23 nt, artificial
  Oligomer
uacuaccuuagacauuugaagau

SEQ ID NO: 18687 - RNA, 23 nt, artificial
  Oligomer
acuaccuuagacauuugaagaua

SEQ ID NO: 18688 - RNA, 23 nt, artificial
  Oligomer
cuaccuuagacauuugaagauag

SEQ ID NO: 18689 - RNA, 23 nt, artificial
  Oligomer
uagacauuugaagauagcuuacu

SEQ ID NO: 18690 - RNA, 23 nt, artificial
  Oligomer
guucaugccauacuuccuaugca

SEQ ID NO: 18691 - RNA, 23 nt, artificial
  Oligomer
uucaugccauacuuccuaugcau

SEQ ID NO: 18692 - RNA, 23 nt, artificial
  Oligomer
ucaugccauacuuccuaugcauu

SEQ ID NO: 18693 - RNA, 23 nt, artificial
  Oligomer
ggacaaauucuacuuccagcagc

SEQ ID NO: 18694 - RNA, 23 nt, artificial
  Oligomer
gacaaauucuacuuccagcagca

SEQ ID NO: 18695 - RNA, 23 nt, artificial
  Oligomer
acaaauucuacuuccagcagcac

SEQ ID NO: 18696 - RNA, 23 nt, artificial
  Oligomer
acuuccagcagcacuuugccuga

SEQ ID NO: 18697 - RNA, 23 nt, artificial
  Oligomer
cuuccagcagcacuuugccugac

SEQ ID NO: 18698 - RNA, 23 nt, artificial
  Oligomer
uuccagcagcacuuugccugaca

SEQ ID NO: 18699 - RNA, 23 nt, artificial
  Oligomer
ggcgcuggccuuuauaauucggg

SEQ ID NO: 18700 - RNA, 23 nt, artificial
  Oligomer
gcgcuggccuuuauaauucgggu

SEQ ID NO: 18701 - RNA, 23 nt, artificial
  Oligomer
cgcuggccuuuauaauucggguc

SEQ ID NO: 18702 - RNA, 23 nt, artificial
  Oligomer
gcuggccuuuauaauucggguca

SEQ ID NO: 18703 - RNA, 23 nt, artificial
  Oligomer
cuggccuuuauaauucgggucac

SEQ ID NO: 18704 - RNA, 23 nt, artificial
  Oligomer
ucaaaacaccuugaucaagguca

SEQ ID NO: 18705 - RNA, 23 nt, artificial
  Oligomer
caaaacaccuugaucaaggucac

SEQ ID NO: 18706 - RNA, 23 nt, artificial
  Oligomer
aaaacaccuugaucaaggucacc

SEQ ID NO: 18707 - RNA, 23 nt, artificial
  Oligomer
aaacaccuugaucaaggucacca

SEQ ID NO: 18708 - RNA, 23 nt, artificial
  Oligomer
aacaccuugaucaaggucaccag

SEQ ID NO: 18709 - RNA, 23 nt, artificial
  Oligomer
gcagauacguaaagggcaaggug

SEQ ID NO: 18710 - RNA, 23 nt, artificial
  Oligomer
aucuuguccaucugaggaaguuc

SEQ ID NO: 18711 - RNA, 23 nt, artificial
  Oligomer
ucuuguccaucugaggaaguucc

SEQ ID NO: 18712 - RNA, 23 nt, artificial
  Oligomer
cuuguccaucugaggaaguuccc

SEQ ID NO: 18713 - RNA, 23 nt, artificial
  Oligomer
uuguccaucugaggaaguuccca

SEQ ID NO: 18714 - RNA, 23 nt, artificial
  Oligomer
uguccaucugaggaaguucccag

SEQ ID NO: 18715 - RNA, 23 nt, artificial
  Oligomer
ggaccuucagaucuuuucagccc

SEQ ID NO: 18716 - RNA, 23 nt, artificial
  Oligomer
gaccuucagaucuuuucagcccc

SEQ ID NO: 18717 - RNA, 23 nt, artificial
  Oligomer
accuucagaucuuuucagccccu

SEQ ID NO: 18718 - RNA, 23 nt, artificial
  Oligomer
ccuucagaucuuuucagccccuu

SEQ ID NO: 18719 - RNA, 23 nt, artificial
  Oligomer
cuucagaucuuuucagccccuug

SEQ ID NO: 18720 - RNA, 23 nt, artificial
  Oligomer
ugaugagacacaugaagcugugg

SEQ ID NO: 18721 - RNA, 23 nt, artificial
  Oligomer
gaugagacacaugaagcuguggu

SEQ ID NO: 18722 - RNA, 23 nt, artificial
  Oligomer
augagacacaugaagcugugguu

SEQ ID NO: 18723 - RNA, 23 nt, artificial
  Oligomer
gguguagggaagucagcuuugac

SEQ ID NO: 18724 - RNA, 23 nt, artificial
  Oligomer
guguagggaagucagcuuugacu

SEQ ID NO: 18725 - RNA, 23 nt, artificial
  Oligomer
uguagggaagucagcuuugacug

SEQ ID NO: 18726 - RNA, 23 nt, artificial
  Oligomer
guagggaagucagcuuugacuga

SEQ ID NO: 18727 - RNA, 23 nt, artificial
  Oligomer
uagggaagucagcuuugacugau

SEQ ID NO: 18728 - RNA, 23 nt, artificial
  Oligomer
ccuuuugccaguagaugcgaguu

SEQ ID NO: 18729 - RNA, 23 nt, artificial
  Oligomer
cuuuugccaguagaugcgaguuu

SEQ ID NO: 18730 - RNA, 23 nt, artificial
  Oligomer
uuuugccaguagaugcgaguuug

SEQ ID NO: 18731 - RNA, 23 nt, artificial
  Oligomer
uuugccaguagaugcgaguuugu

SEQ ID NO: 18732 - RNA, 23 nt, artificial
  Oligomer
ugugccagcucuucaacagaaac

SEQ ID NO: 18733 - RNA, 23 nt, artificial
  Oligomer
aggacagcguugccacuucuuuc

SEQ ID NO: 18734 - RNA, 23 nt, artificial
  Oligomer
ggacagcguugccacuucuuuca

SEQ ID NO: 18735 - RNA, 23 nt, artificial
  Oligomer
gacagcguugccacuucuuucac

SEQ ID NO: 18736 - RNA, 23 nt, artificial
  Oligomer
acagcguugccacuucuuucacu

SEQ ID NO: 18737 - RNA, 23 nt, artificial
  Oligomer
cagcguugccacuucuuucacuu

SEQ ID NO: 18738 - RNA, 23 nt, artificial
  Oligomer
cugaaagaaauugagguauggac

SEQ ID NO: 18739 - RNA, 23 nt, artificial
  Oligomer
ugaaagaaauugagguauggaca

SEQ ID NO: 18740 - RNA, 23 nt, artificial
  Oligomer
gaaagaaauugagguauggacac

SEQ ID NO: 18741 - RNA, 23 nt, artificial
  Oligomer
aaagaaauugagguauggacacu

SEQ ID NO: 18742 - RNA, 23 nt, artificial
  Oligomer
aagaaauugagguauggacacuu

SEQ ID NO: 18743 - RNA, 23 nt, artificial
  Oligomer
cugcuguagaauacaggaauuac

SEQ ID NO: 18744 - RNA, 23 nt, artificial
  Oligomer
ugcuguagaauacaggaauuacu

SEQ ID NO: 18745 - RNA, 23 nt, artificial
  Oligomer
gcuguagaauacaggaauuacuu

SEQ ID NO: 18746 - RNA, 23 nt, artificial
  Oligomer
cuguagaauacaggaauuacuua

SEQ ID NO: 18747 - RNA, 23 nt, artificial
  Oligomer
uguagaauacaggaauuacuuag

SEQ ID NO: 18748 - RNA, 23 nt, artificial
  Oligomer
auagaaacauagucaucacaacu

SEQ ID NO: 18749 - RNA, 23 nt, artificial
  Oligomer
gaguuaaguauuccugucaauac

SEQ ID NO: 18750 - RNA, 23 nt, artificial
  Oligomer
aguuaaguauuccugucaauacg

SEQ ID NO: 18751 - RNA, 23 nt, artificial
  Oligomer
guuaaguauuccugucaauacgg

SEQ ID NO: 18752 - RNA, 23 nt, artificial
  Oligomer
uuaaguauuccugucaauacggg

SEQ ID NO: 18753 - RNA, 23 nt, artificial
  Oligomer
uaaguauuccugucaauacggga

SEQ ID NO: 18754 - RNA, 23 nt, artificial
  Oligomer
uuccugucaauacgggaaacacu

SEQ ID NO: 18755 - RNA, 23 nt, artificial
  Oligomer
uccugucaauacgggaaacacug

SEQ ID NO: 18756 - RNA, 23 nt, artificial
  Oligomer
ccugucaauacgggaaacacugc

SEQ ID NO: 18757 - RNA, 23 nt, artificial
  Oligomer
cugucaauacgggaaacacugcu

SEQ ID NO: 18758 - RNA, 23 nt, artificial
  Oligomer
ugucaauacgggaaacacugcua

SEQ ID NO: 18759 - RNA, 23 nt, artificial
  Oligomer
uacacaggagcaagguuugugaa

SEQ ID NO: 18760 - RNA, 23 nt, artificial
  Oligomer
agugauguuuacaaaacacacag

SEQ ID NO: 18761 - RNA, 23 nt, artificial
  Oligomer
gugauguuuacaaaacacacaga

SEQ ID NO: 18762 - RNA, 23 nt, artificial
  Oligomer
ugauguuuacaaaacacacagag

SEQ ID NO: 18763 - RNA, 23 nt, artificial
  Oligomer
aaaguuacuaccuuagacauuug

SEQ ID NO: 18764 - RNA, 23 nt, artificial
  Oligomer
aaguuacuaccuuagacauuuga

SEQ ID NO: 18765 - RNA, 23 nt, artificial
  Oligomer
aguuacuaccuuagacauuugaa

SEQ ID NO: 18766 - RNA, 23 nt, artificial
  Oligomer
guuacuaccuuagacauuugaag

SEQ ID NO: 18767 - RNA, 23 nt, artificial
  Oligomer
uucugcuguaccucaugggggag

SEQ ID NO: 18768 - RNA, 23 nt, artificial
  Oligomer
ucagauagucucugaaguugacc

SEQ ID NO: 18769 - RNA, 23 nt, artificial
  Oligomer
uguuauuggacaaauucuacuuc

SEQ ID NO: 18770 - RNA, 23 nt, artificial
  Oligomer
gugcccaccauauuccucuagac

SEQ ID NO: 18771 - RNA, 23 nt, artificial
  Oligomer
ggaaaaugcucuugcuugguugu

SEQ ID NO: 18772 - RNA, 23 nt, artificial
  Oligomer
gaaaaugcucuugcuugguugua

SEQ ID NO: 18773 - RNA, 23 nt, artificial
  Oligomer
aaaaugcucuugcuugguuguau

SEQ ID NO: 18774 - RNA, 23 nt, artificial
  Oligomer
aaaugcucuugcuugguuguauu

SEQ ID NO: 18775 - RNA, 23 nt, artificial
  Oligomer
uccauuuuccaaccaggagaggu

SEQ ID NO: 18776 - RNA, 23 nt, artificial
  Oligomer
gaaguuggaauuucaaagucaga

SEQ ID NO: 18777 - RNA, 23 nt, artificial
  Oligomer
cucguaugugcccucgucagaug

SEQ ID NO: 18778 - RNA, 23 nt, artificial
  Oligomer
ucguaugugcccucgucagaugg

SEQ ID NO: 18779 - RNA, 23 nt, artificial
  Oligomer
cguaugugcccucgucagauggg

SEQ ID NO: 18780 - RNA, 23 nt, artificial
  Oligomer
guaugugcccucgucagaugggc

SEQ ID NO: 18781 - RNA, 23 nt, artificial
  Oligomer
uaugugcccucgucagaugggcg

SEQ ID NO: 18782 - RNA, 23 nt, artificial
  Oligomer
acucgggccauauauucaugucc

SEQ ID NO: 18783 - RNA, 23 nt, artificial
  Oligomer
cucgggccauauauucauguccc

SEQ ID NO: 18784 - RNA, 23 nt, artificial
  Oligomer
ucgggccauauauucaugucccc

SEQ ID NO: 18785 - RNA, 23 nt, artificial
  Oligomer
uggguaaucuucagagaggcgac

SEQ ID NO: 18786 - RNA, 23 nt, artificial
  Oligomer
ccagcucuucaacagaaacauug

SEQ ID NO: 18787 - RNA, 23 nt, artificial
  Oligomer
cagcucuucaacagaaacauugu

SEQ ID NO: 18788 - RNA, 23 nt, artificial
  Oligomer
agcucuucaacagaaacauugug

SEQ ID NO: 18789 - RNA, 23 nt, artificial
  Oligomer
uggauaacaccugaacagaagug

SEQ ID NO: 18790 - RNA, 23 nt, artificial
  Oligomer
ggauaacaccugaacagaaguga

SEQ ID NO: 18791 - RNA, 23 nt, artificial
  Oligomer
gauaacaccugaacagaagugag

SEQ ID NO: 18792 - RNA, 23 nt, artificial
  Oligomer
auaacaccugaacagaagugaga

SEQ ID NO: 18793 - RNA, 23 nt, artificial
  Oligomer
uaacaccugaacagaagugagaa

SEQ ID NO: 18794 - RNA, 23 nt, artificial
  Oligomer
uuggacccaaguaagaccagggc

SEQ ID NO: 18795 - RNA, 23 nt, artificial
  Oligomer
agugagguagcuaaagccauggg

SEQ ID NO: 18796 - RNA, 23 nt, artificial
  Oligomer
gugagguagcuaaagccaugggc

SEQ ID NO: 18797 - RNA, 23 nt, artificial
  Oligomer
ugagguagcuaaagccaugggcu

SEQ ID NO: 18798 - RNA, 23 nt, artificial
  Oligomer
aaguugcguccacuucuggucua

SEQ ID NO: 18799 - RNA, 23 nt, artificial
  Oligomer
aguugcguccacuucuggucuag

SEQ ID NO: 18800 - RNA, 23 nt, artificial
  Oligomer
guugcguccacuucuggucuagu

SEQ ID NO: 18801 - RNA, 23 nt, artificial
  Oligomer
uugcguccacuucuggucuagug

SEQ ID NO: 18802 - RNA, 23 nt, artificial
  Oligomer
acacagagauuggaggguguucc

SEQ ID NO: 18803 - RNA, 23 nt, artificial
  Oligomer
cacagagauuggaggguguuccu

SEQ ID NO: 18804 - RNA, 23 nt, artificial
  Oligomer
acagagauuggaggguguuccug

SEQ ID NO: 18805 - RNA, 23 nt, artificial
  Oligomer
cagagauuggaggguguuccugg

SEQ ID NO: 18806 - RNA, 23 nt, artificial
  Oligomer
agagauuggaggguguuccuggg

SEQ ID NO: 18807 - RNA, 23 nt, artificial
  Oligomer
ggaaaguuacuaccuuagacauu

SEQ ID NO: 18808 - RNA, 23 nt, artificial
  Oligomer
gaaaguuacuaccuuagacauuu

SEQ ID NO: 18809 - RNA, 23 nt, artificial
  Oligomer
ugacuacugcuuugacguaccua

SEQ ID NO: 18810 - RNA, 23 nt, artificial
  Oligomer
gacuacugcuuugacguaccuaa

SEQ ID NO: 18811 - RNA, 23 nt, artificial
  Oligomer
acuacugcuuugacguaccuaaa

SEQ ID NO: 18812 - RNA, 23 nt, artificial
  Oligomer
ucgucuuacaugucagaggaaau

SEQ ID NO: 18813 - RNA, 23 nt, artificial
  Oligomer
uacauugggcuuuuguaaacagc

SEQ ID NO: 18814 - RNA, 23 nt, artificial
  Oligomer
acauugggcuuuuguaaacagca

SEQ ID NO: 18815 - RNA, 23 nt, artificial
  Oligomer
cauugggcuuuuguaaacagcag

SEQ ID NO: 18816 - RNA, 23 nt, artificial
  Oligomer
auugggcuuuuguaaacagcagc

SEQ ID NO: 18817 - RNA, 23 nt, artificial
  Oligomer
uugggcuuuuguaaacagcagca

SEQ ID NO: 18818 - RNA, 23 nt, artificial
  Oligomer
uacagaggguuugaguucacuca

SEQ ID NO: 18819 - RNA, 23 nt, artificial
  Oligomer
agucucugaaguugaccuguuau

SEQ ID NO: 18820 - RNA, 23 nt, artificial
  Oligomer
gucucugaaguugaccuguuauu

SEQ ID NO: 18821 - RNA, 23 nt, artificial
  Oligomer
auauaccaguuaacaggccacag

SEQ ID NO: 18822 - RNA, 23 nt, artificial
  Oligomer
uauaccaguuaacaggccacagu

SEQ ID NO: 18823 - RNA, 23 nt, artificial
  Oligomer
ucauuaauaacacugguauucuc

SEQ ID NO: 18824 - RNA, 23 nt, artificial
  Oligomer
ugaucaaggucaccagagcuacu

SEQ ID NO: 18825 - RNA, 23 nt, artificial
  Oligomer
gaucaaggucaccagagcuacuu

SEQ ID NO: 18826 - RNA, 23 nt, artificial
  Oligomer
aucaaggucaccagagcuacuuc

SEQ ID NO: 18827 - RNA, 23 nt, artificial
  Oligomer
ucaaggucaccagagcuacuucu

SEQ ID NO: 18828 - RNA, 23 nt, artificial
  Oligomer
ggcguacacuuucccuucucaau

SEQ ID NO: 18829 - RNA, 23 nt, artificial
  Oligomer
uuaucaggaaaaugcucuugcuu

SEQ ID NO: 18830 - RNA, 23 nt, artificial
  Oligomer
cagauauacuagguguagggaag

SEQ ID NO: 18831 - RNA, 23 nt, artificial
  Oligomer
agauauacuagguguagggaagu

SEQ ID NO: 18832 - RNA, 23 nt, artificial
  Oligomer
gauauacuagguguagggaaguc

SEQ ID NO: 18833 - RNA, 23 nt, artificial
  Oligomer
auauacuagguguagggaaguca

SEQ ID NO: 18834 - RNA, 23 nt, artificial
  Oligomer
uauacuagguguagggaagucag

SEQ ID NO: 18835 - RNA, 23 nt, artificial
  Oligomer
agcguugccacuucuuucacuuc

SEQ ID NO: 18836 - RNA, 23 nt, artificial
  Oligomer
acagaagugagaaagaccagcca

SEQ ID NO: 18837 - RNA, 23 nt, artificial
  Oligomer
cagaagugagaaagaccagccag

SEQ ID NO: 18838 - RNA, 23 nt, artificial
  Oligomer
agaagugagaaagaccagccagc

SEQ ID NO: 18839 - RNA, 23 nt, artificial
  Oligomer
agaaauugagguauggacacuug

SEQ ID NO: 18840 - RNA, 23 nt, artificial
  Oligomer
ucagaugcuuagggucaaaagug

SEQ ID NO: 18841 - RNA, 23 nt, artificial
  Oligomer
cagaugcuuagggucaaaaguga

SEQ ID NO: 18842 - RNA, 23 nt, artificial
  Oligomer
agaugcuuagggucaaaagugaa

SEQ ID NO: 18843 - RNA, 23 nt, artificial
  Oligomer
gaugcuuagggucaaaagugaaa

SEQ ID NO: 18844 - RNA, 23 nt, artificial
  Oligomer
cacguagaagacccuccagugau

SEQ ID NO: 18845 - RNA, 23 nt, artificial
  Oligomer
acguagaagacccuccagugaug

SEQ ID NO: 18846 - RNA, 23 nt, artificial
  Oligomer
cguagaagacccuccagugaugu

SEQ ID NO: 18847 - RNA, 23 nt, artificial
  Oligomer
guagaagacccuccagugauguu

SEQ ID NO: 18848 - RNA, 23 nt, artificial
  Oligomer
uagaagacccuccagugauguuu

SEQ ID NO: 18849 - RNA, 23 nt, artificial
  Oligomer
guaccuuauguugguguuagacc

SEQ ID NO: 18850 - RNA, 23 nt, artificial
  Oligomer
ccagugauguuuacaaaacacac

SEQ ID NO: 18851 - RNA, 23 nt, artificial
  Oligomer
cagugauguuuacaaaacacaca

SEQ ID NO: 18852 - RNA, 23 nt, artificial
  Oligomer
aucccagcuuaaguugcguccac

SEQ ID NO: 18853 - RNA, 23 nt, artificial
  Oligomer
ucccagcuuaaguugcguccacu

SEQ ID NO: 18854 - RNA, 23 nt, artificial
  Oligomer
gcccuauggaaaguuacuaccuu

SEQ ID NO: 18855 - RNA, 23 nt, artificial
  Oligomer
cccuauggaaaguuacuaccuua

SEQ ID NO: 18856 - RNA, 23 nt, artificial
  Oligomer
gaagauagcuuacugcuuaguac

SEQ ID NO: 18857 - RNA, 23 nt, artificial
  Oligomer
aagauagcuuacugcuuaguaca

SEQ ID NO: 18858 - RNA, 23 nt, artificial
  Oligomer
agauagcuuacugcuuaguacau

SEQ ID NO: 18859 - RNA, 23 nt, artificial
  Oligomer
gauagcuuacugcuuaguacaua

SEQ ID NO: 18860 - RNA, 23 nt, artificial
  Oligomer
auagcuuacugcuuaguacauac

SEQ ID NO: 18861 - RNA, 23 nt, artificial
  Oligomer
acaaaugaggucaaacuagcaua

SEQ ID NO: 18862 - RNA, 23 nt, artificial
  Oligomer
caaaugaggucaaacuagcauaa

SEQ ID NO: 18863 - RNA, 23 nt, artificial
  Oligomer
aaaugaggucaaacuagcauaaa

SEQ ID NO: 18864 - RNA, 23 nt, artificial
  Oligomer
aaugaggucaaacuagcauaaag

SEQ ID NO: 18865 - RNA, 23 nt, artificial
  Oligomer
augaggucaaacuagcauaaagc

SEQ ID NO: 18866 - RNA, 23 nt, artificial
  Oligomer
cuacugcuuugacguaccuaaau

SEQ ID NO: 18867 - RNA, 23 nt, artificial
  Oligomer
uacugcuuugacguaccuaaauc

SEQ ID NO: 18868 - RNA, 23 nt, artificial
  Oligomer
gcagcauaaaaucuucuacucug

SEQ ID NO: 18869 - RNA, 23 nt, artificial
  Oligomer
cagcauaaaaucuucuacucuga

SEQ ID NO: 18870 - RNA, 23 nt, artificial
  Oligomer
uggacaaauucuacuuccagcag

SEQ ID NO: 18871 - RNA, 23 nt, artificial
  Oligomer
caggcagcauaucacaaaaauuc

SEQ ID NO: 18872 - RNA, 23 nt, artificial
  Oligomer
aggcagcauaucacaaaaauucc

SEQ ID NO: 18873 - RNA, 23 nt, artificial
  Oligomer
ggcagcauaucacaaaaauucca

SEQ ID NO: 18874 - RNA, 23 nt, artificial
  Oligomer
gcagcauaucacaaaaauuccau

SEQ ID NO: 18875 - RNA, 23 nt, artificial
  Oligomer
cagcauaucacaaaaauuccauu

SEQ ID NO: 18876 - RNA, 23 nt, artificial
  Oligomer
cugagauuaagguaauggcccag

SEQ ID NO: 18877 - RNA, 23 nt, artificial
  Oligomer
ucugagauguucucuucuuacag

SEQ ID NO: 18878 - RNA, 23 nt, artificial
  Oligomer
cugagauguucucuucuuacagu

SEQ ID NO: 18879 - RNA, 23 nt, artificial
  Oligomer
guccauacuugaugagacacaug

SEQ ID NO: 18880 - RNA, 23 nt, artificial
  Oligomer
cagcuuugacugauaacgucacu

SEQ ID NO: 18881 - RNA, 23 nt, artificial
  Oligomer
ggguaaucuucagagaggcgaca

SEQ ID NO: 18882 - RNA, 23 nt, artificial
  Oligomer
gguaaucuucagagaggcgacau

SEQ ID NO: 18883 - RNA, 23 nt, artificial
  Oligomer
guaaucuucagagaggcgacauu

SEQ ID NO: 18884 - RNA, 23 nt, artificial
  Oligomer
uaaucuucagagaggcgacauuu

SEQ ID NO: 18885 - RNA, 23 nt, artificial
  Oligomer
aagccaacaauuuggacccaagu

SEQ ID NO: 18886 - RNA, 23 nt, artificial
  Oligomer
aaggcuuuaaaucccagccaugu

SEQ ID NO: 18887 - RNA, 23 nt, artificial
  Oligomer
uaaugugauuaucccagcuuaag

SEQ ID NO: 18888 - RNA, 23 nt, artificial
  Oligomer
ggucuagugaauuguggaaggca

SEQ ID NO: 18889 - RNA, 23 nt, artificial
  Oligomer
gucuagugaauuguggaaggcag

SEQ ID NO: 18890 - RNA, 23 nt, artificial
  Oligomer
ucuagugaauuguggaaggcagu

SEQ ID NO: 18891 - RNA, 23 nt, artificial
  Oligomer
cuagugaauuguggaaggcaguu

SEQ ID NO: 18892 - RNA, 23 nt, artificial
  Oligomer
uagugaauuguggaaggcaguuu

SEQ ID NO: 18893 - RNA, 23 nt, artificial
  Oligomer
ugaguaacaugaacagcaguugg

SEQ ID NO: 18894 - RNA, 23 nt, artificial
  Oligomer
gaguaacaugaacagcaguuggc

SEQ ID NO: 18895 - RNA, 23 nt, artificial
  Oligomer
aguaacaugaacagcaguuggcu

SEQ ID NO: 18896 - RNA, 23 nt, artificial
  Oligomer
guaacaugaacagcaguuggcua

SEQ ID NO: 18897 - RNA, 23 nt, artificial
  Oligomer
uaacaugaacagcaguuggcuau

SEQ ID NO: 18898 - RNA, 23 nt, artificial
  Oligomer
gaaagacccagaaauaccaagga

SEQ ID NO: 18899 - RNA, 23 nt, artificial
  Oligomer
aaagacccagaaauaccaaggag

SEQ ID NO: 18900 - RNA, 23 nt, artificial
  Oligomer
aagacccagaaauaccaaggaga

SEQ ID NO: 18901 - RNA, 23 nt, artificial
  Oligomer
agacccagaaauaccaaggagaa

SEQ ID NO: 18902 - RNA, 23 nt, artificial
  Oligomer
agcuuacugcuuaguacauacac

SEQ ID NO: 18903 - RNA, 23 nt, artificial
  Oligomer
gcuuacugcuuaguacauacacu

SEQ ID NO: 18904 - RNA, 23 nt, artificial
  Oligomer
uacaaaugaggucaaacuagcau

SEQ ID NO: 18905 - RNA, 23 nt, artificial
  Oligomer
gaggucaaacuagcauaaagcca

SEQ ID NO: 18906 - RNA, 23 nt, artificial
  Oligomer
aggucaaacuagcauaaagccau

SEQ ID NO: 18907 - RNA, 23 nt, artificial
  Oligomer
ggucaaacuagcauaaagccauu

SEQ ID NO: 18908 - RNA, 23 nt, artificial
  Oligomer
gucaaacuagcauaaagccauuu

SEQ ID NO: 18909 - RNA, 23 nt, artificial
  Oligomer
ucaaacuagcauaaagccauuua

SEQ ID NO: 18910 - RNA, 23 nt, artificial
  Oligomer
acugcuuugacguaccuaaauca

SEQ ID NO: 18911 - RNA, 23 nt, artificial
  Oligomer
ggaauacuggguaaacaccaaua

SEQ ID NO: 18912 - RNA, 23 nt, artificial
  Oligomer
gaauacuggguaaacaccaauaa

SEQ ID NO: 18913 - RNA, 23 nt, artificial
  Oligomer
aauacuggguaaacaccaauaau

SEQ ID NO: 18914 - RNA, 23 nt, artificial
  Oligomer
auacuggguaaacaccaauaaua

SEQ ID NO: 18915 - RNA, 23 nt, artificial
  Oligomer
uacuggguaaacaccaauaauau

SEQ ID NO: 18916 - RNA, 23 nt, artificial
  Oligomer
uccuaaagauguucaugccauac

SEQ ID NO: 18917 - RNA, 23 nt, artificial
  Oligomer
ccuaaagauguucaugccauacu

SEQ ID NO: 18918 - RNA, 23 nt, artificial
  Oligomer
cuaaagauguucaugccauacuu

SEQ ID NO: 18919 - RNA, 23 nt, artificial
  Oligomer
uaaagauguucaugccauacuuc

SEQ ID NO: 18920 - RNA, 23 nt, artificial
  Oligomer
uuacauugggcuuuuguaaacag

SEQ ID NO: 18921 - RNA, 23 nt, artificial
  Oligomer
ucaaacugauaaagggaaagagc

SEQ ID NO: 18922 - RNA, 23 nt, artificial
  Oligomer
caaacugauaaagggaaagagca

SEQ ID NO: 18923 - RNA, 23 nt, artificial
  Oligomer
aaacugauaaagggaaagagcac

SEQ ID NO: 18924 - RNA, 23 nt, artificial
  Oligomer
aacugauaaagggaaagagcacc

SEQ ID NO: 18925 - RNA, 23 nt, artificial
  Oligomer
acugauaaagggaaagagcacca

SEQ ID NO: 18926 - RNA, 23 nt, artificial
  Oligomer
uccagaacucaagaauucugcau

SEQ ID NO: 18927 - RNA, 23 nt, artificial
  Oligomer
gaaguucccagaagaggucaauu

SEQ ID NO: 18928 - RNA, 23 nt, artificial
  Oligomer
aggaucuugggaaacuguugugu

SEQ ID NO: 18929 - RNA, 23 nt, artificial
  Oligomer
ggaucuugggaaacuguuguguu

SEQ ID NO: 18930 - RNA, 23 nt, artificial
  Oligomer
uuguguugauggcauuuaauucu

SEQ ID NO: 18931 - RNA, 23 nt, artificial
  Oligomer
uguguugauggcauuuaauucuu

SEQ ID NO: 18932 - RNA, 23 nt, artificial
  Oligomer
guguugauggcauuuaauucuuc

SEQ ID NO: 18933 - RNA, 23 nt, artificial
  Oligomer
uguugauggcauuuaauucuucu

SEQ ID NO: 18934 - RNA, 23 nt, artificial
  Oligomer
gaggugaggcucuggaaaaccuc

SEQ ID NO: 18935 - RNA, 23 nt, artificial
  Oligomer
aggugaggcucuggaaaaccucc

SEQ ID NO: 18936 - RNA, 23 nt, artificial
  Oligomer
ggugaggcucuggaaaaccucca

SEQ ID NO: 18937 - RNA, 23 nt, artificial
  Oligomer
gugaggcucuggaaaaccuccag

SEQ ID NO: 18938 - RNA, 23 nt, artificial
  Oligomer
ugaggcucuggaaaaccuccaga

SEQ ID NO: 18939 - RNA, 23 nt, artificial
  Oligomer
ucuauaaagcaaugacaaaucac

SEQ ID NO: 18940 - RNA, 23 nt, artificial
  Oligomer
cuauaaagcaaugacaaaucacu

SEQ ID NO: 18941 - RNA, 23 nt, artificial
  Oligomer
uauaaagcaaugacaaaucacuu

SEQ ID NO: 18942 - RNA, 23 nt, artificial
  Oligomer
auaaagcaaugacaaaucacuuu

SEQ ID NO: 18943 - RNA, 23 nt, artificial
  Oligomer
uaaagcaaugacaaaucacuuuu

SEQ ID NO: 18944 - RNA, 23 nt, artificial
  Oligomer
ugccaugagaugugcauuugaga

SEQ ID NO: 18945 - RNA, 23 nt, artificial
  Oligomer
gccaugagaugugcauuugagaa

SEQ ID NO: 18946 - RNA, 23 nt, artificial
  Oligomer
ccaugagaugugcauuugagaaa

SEQ ID NO: 18947 - RNA, 23 nt, artificial
  Oligomer
caugagaugugcauuugagaaau

SEQ ID NO: 18948 - RNA, 23 nt, artificial
  Oligomer
augagaugugcauuugagaaaug

SEQ ID NO: 18949 - RNA, 23 nt, artificial
  Oligomer
agaugugcauuugagaaauguug

SEQ ID NO: 18950 - RNA, 23 nt, artificial
  Oligomer
gaugugcauuugagaaauguugu

SEQ ID NO: 18951 - RNA, 23 nt, artificial
  Oligomer
augugcauuugagaaauguuguc

SEQ ID NO: 18952 - RNA, 23 nt, artificial
  Oligomer
ugugcauuugagaaauguugucu

SEQ ID NO: 18953 - RNA, 23 nt, artificial
  Oligomer
gugcauuugagaaauguugucuu

SEQ ID NO: 18954 - RNA, 23 nt, artificial
  Oligomer
caucuuagggaucuaaggaggcc

SEQ ID NO: 18955 - RNA, 23 nt, artificial
  Oligomer
aucuuagggaucuaaggaggccc

SEQ ID NO: 18956 - RNA, 23 nt, artificial
  Oligomer
ucuuagggaucuaaggaggcccu

SEQ ID NO: 18957 - RNA, 23 nt, artificial
  Oligomer
cuuagggaucuaaggaggcccua

SEQ ID NO: 18958 - RNA, 23 nt, artificial
  Oligomer
uuagggaucuaaggaggcccuau

SEQ ID NO: 18959 - RNA, 23 nt, artificial
  Oligomer
acacuguaaacaacgaucucauu

SEQ ID NO: 18960 - RNA, 23 nt, artificial
  Oligomer
cacuguaaacaacgaucucauuu

SEQ ID NO: 18961 - RNA, 23 nt, artificial
  Oligomer
acuguaaacaacgaucucauuuu

SEQ ID NO: 18962 - RNA, 23 nt, artificial
  Oligomer
gagcagcaauagagaacacaaug

SEQ ID NO: 18963 - RNA, 23 nt, artificial
  Oligomer
agcagcaauagagaacacaauga

SEQ ID NO: 18964 - RNA, 23 nt, artificial
  Oligomer
gcagcaauagagaacacaaugaa

SEQ ID NO: 18965 - RNA, 23 nt, artificial
  Oligomer
cagcaauagagaacacaaugaaa

SEQ ID NO: 18966 - RNA, 23 nt, artificial
  Oligomer
agcaauagagaacacaaugaaaa

SEQ ID NO: 18967 - RNA, 23 nt, artificial
  Oligomer
ugacauuaggaaaucagauaguc

SEQ ID NO: 18968 - RNA, 23 nt, artificial
  Oligomer
ggucaccagagcuacuucugugc

SEQ ID NO: 18969 - RNA, 23 nt, artificial
  Oligomer
gucaccagagcuacuucugugcc

SEQ ID NO: 18970 - RNA, 23 nt, artificial
  Oligomer
ucaccagagcuacuucugugccc

SEQ ID NO: 18971 - RNA, 23 nt, artificial
  Oligomer
caccagagcuacuucugugccca

SEQ ID NO: 18972 - RNA, 23 nt, artificial
  Oligomer
accagagcuacuucugugcccac

SEQ ID NO: 18973 - RNA, 23 nt, artificial
  Oligomer
uguauuccaguugaaggucugau

SEQ ID NO: 18974 - RNA, 23 nt, artificial
  Oligomer
guauuccaguugaaggucugauu

SEQ ID NO: 18975 - RNA, 23 nt, artificial
  Oligomer
uauuccaguugaaggucugauuc

SEQ ID NO: 18976 - RNA, 23 nt, artificial
  Oligomer
auuccaguugaaggucugauuca

SEQ ID NO: 18977 - RNA, 23 nt, artificial
  Oligomer
uuccaguugaaggucugauucac

SEQ ID NO: 18978 - RNA, 23 nt, artificial
  Oligomer
guuguguugauggcauuuaauuc

SEQ ID NO: 18979 - RNA, 23 nt, artificial
  Oligomer
gcugaugacaauccaauugcuca

SEQ ID NO: 18980 - RNA, 23 nt, artificial
  Oligomer
cugaugacaauccaauugcucac

SEQ ID NO: 18981 - RNA, 23 nt, artificial
  Oligomer
ugaugacaauccaauugcucacg

SEQ ID NO: 18982 - RNA, 23 nt, artificial
  Oligomer
gaugacaauccaauugcucacgu

SEQ ID NO: 18983 - RNA, 23 nt, artificial
  Oligomer
augacaauccaauugcucacgua

SEQ ID NO: 18984 - RNA, 23 nt, artificial
  Oligomer
ucugcuguagaauacaggaauua

SEQ ID NO: 18985 - RNA, 23 nt, artificial
  Oligomer
gucaucacaacuguuacuaaaug

SEQ ID NO: 18986 - RNA, 23 nt, artificial
  Oligomer
ucaucacaacuguuacuaaaugg

SEQ ID NO: 18987 - RNA, 23 nt, artificial
  Oligomer
caucacaacuguuacuaaaugga

SEQ ID NO: 18988 - RNA, 23 nt, artificial
  Oligomer
aucacaacuguuacuaaauggaa

SEQ ID NO: 18989 - RNA, 23 nt, artificial
  Oligomer
ucacaacuguuacuaaauggaaa

SEQ ID NO: 18990 - RNA, 23 nt, artificial
  Oligomer
guuagaccucucugcccuacacu

SEQ ID NO: 18991 - RNA, 23 nt, artificial
  Oligomer
uuagaccucucugcccuacacug

SEQ ID NO: 18992 - RNA, 23 nt, artificial
  Oligomer
cuggcucuaaaggcuuuaaaucc

SEQ ID NO: 18993 - RNA, 23 nt, artificial
  Oligomer
aacaugaacagcaguuggcuaug

SEQ ID NO: 18994 - RNA, 19 nt, artificial
  Oligomer
gggagaaaugacuuugaaa

SEQ ID NO: 18995 - RNA, 19 nt, artificial
  Oligomer
gagugaacagaccaagaaa

SEQ ID NO: 18996 - RNA, 19 nt, artificial
  Oligomer
ggguuuuggugauacccaa

SEQ ID NO: 18997 - RNA, 19 nt, artificial
  Oligomer
cagaccaagaaaagagaaa

SEQ ID NO: 18998 - RNA, 19 nt, artificial
  Oligomer
cauaguggagagaacugaa

SEQ ID NO: 18999 - RNA, 19 nt, artificial
  Oligomer
agaccaagaaaagagaaaa

SEQ ID NO: 19000 - RNA, 19 nt, artificial
  Oligomer
aggaaaacuugguucugaa

SEQ ID NO: 19001 - RNA, 19 nt, artificial
  Oligomer
ggagccugagccacaaaaa

SEQ ID NO: 19002 - RNA, 19 nt, artificial
  Oligomer
ccagcauagggcuagcaaa

SEQ ID NO: 19003 - RNA, 19 nt, artificial
  Oligomer
ucaugaccuggaaauaaaa

SEQ ID NO: 19004 - RNA, 19 nt, artificial
  Oligomer
agcccagcguguuuuuaaa

SEQ ID NO: 19005 - RNA, 19 nt, artificial
  Oligomer
gcagaaaucucaagauaau

SEQ ID NO: 19006 - RNA, 19 nt, artificial
  Oligomer
ggaagagcugcaacggaau

SEQ ID NO: 19007 - RNA, 19 nt, artificial
  Oligomer
guguguaccugugacuaaa

SEQ ID NO: 19008 - RNA, 19 nt, artificial
  Oligomer
ggagaaaugacuuugaaaa

SEQ ID NO: 19009 - RNA, 19 nt, artificial
  Oligomer
gcugcaacggaauuaggaa

SEQ ID NO: 19010 - RNA, 19 nt, artificial
  Oligomer
gcaacaaugagcagaccaa

SEQ ID NO: 19011 - RNA, 19 nt, artificial
  Oligomer
agcugugaaagaaccaaaa

SEQ ID NO: 19012 - RNA, 19 nt, artificial
  Oligomer
aggaagagcugcaacggaa

SEQ ID NO: 19013 - RNA, 19 nt, artificial
  Oligomer
ccuugauaaugggaugaau

SEQ ID NO: 19014 - RNA, 19 nt, artificial
  Oligomer
caaugagcagaccaaccua

SEQ ID NO: 19015 - RNA, 19 nt, artificial
  Oligomer
cugucuaauucuauggaaa

SEQ ID NO: 19016 - RNA, 19 nt, artificial
  Oligomer
gaugauuguuuuugcucaa

SEQ ID NO: 19017 - RNA, 19 nt, artificial
  Oligomer
gauggauagucuguccaaa

SEQ ID NO: 19018 - RNA, 19 nt, artificial
  Oligomer
ccaucaacaagucuugaaa

SEQ ID NO: 19019 - RNA, 19 nt, artificial
  Oligomer
ggaaauuaggagaggcaga

SEQ ID NO: 19020 - RNA, 19 nt, artificial
  Oligomer
accugugacuaaacaacua

SEQ ID NO: 19021 - RNA, 19 nt, artificial
  Oligomer
ccacaggaaugauucgcau

SEQ ID NO: 19022 - RNA, 19 nt, artificial
  Oligomer
caauuugcaaacucucaaa

SEQ ID NO: 19023 - RNA, 19 nt, artificial
  Oligomer
gagagugaacagaccaaga

SEQ ID NO: 19024 - RNA, 19 nt, artificial
  Oligomer
ggaugauuguuuuugcuca

SEQ ID NO: 19025 - RNA, 19 nt, artificial
  Oligomer
caagcuuauuucaaugaga

SEQ ID NO: 19026 - RNA, 19 nt, artificial
  Oligomer
ccagcuuaauggcucauga

SEQ ID NO: 19027 - RNA, 19 nt, artificial
  Oligomer
ggagagggaagagagugaa

SEQ ID NO: 19028 - RNA, 19 nt, artificial
  Oligomer
gccucgcaacucuuauaaa

SEQ ID NO: 19029 - RNA, 19 nt, artificial
  Oligomer
cacaaaaagcccacaggaa

SEQ ID NO: 19030 - RNA, 19 nt, artificial
  Oligomer
ggaagaccaagacacagau

SEQ ID NO: 19031 - RNA, 19 nt, artificial
  Oligomer
acagaccaagaaaagagaa

SEQ ID NO: 19032 - RNA, 19 nt, artificial
  Oligomer
aacagaccaagaaaagaga

SEQ ID NO: 19033 - RNA, 19 nt, artificial
  Oligomer
ugaacagaccaagaaaaga

SEQ ID NO: 19034 - RNA, 19 nt, artificial
  Oligomer
caguguucauuccaaguau

SEQ ID NO: 19035 - RNA, 19 nt, artificial
  Oligomer
cggccucgcaacucuuaua

SEQ ID NO: 19036 - RNA, 19 nt, artificial
  Oligomer
uguuaugcagaaaucucaa

SEQ ID NO: 19037 - RNA, 19 nt, artificial
  Oligomer
gucucugcccaaacauaaa

SEQ ID NO: 19038 - RNA, 19 nt, artificial
  Oligomer
gagagaggaagagcugcaa

SEQ ID NO: 19039 - RNA, 19 nt, artificial
  Oligomer
ccaauuugcaaacucucaa

SEQ ID NO: 19040 - RNA, 19 nt, artificial
  Oligomer
uauggaaauggaagaagaa

SEQ ID NO: 19041 - RNA, 19 nt, artificial
  Oligomer
cuaagaaccaagaauucaa

SEQ ID NO: 19042 - RNA, 19 nt, artificial
  Oligomer
ccaccagaugaauucugaa

SEQ ID NO: 19043 - RNA, 19 nt, artificial
  Oligomer
gcaaacucucaaaaccaaa

SEQ ID NO: 19044 - RNA, 19 nt, artificial
  Oligomer
agaacugaauaaacaggaa

SEQ ID NO: 19045 - RNA, 19 nt, artificial
  Oligomer
aguggagagaacugaauaa

SEQ ID NO: 19046 - RNA, 19 nt, artificial
  Oligomer
ccucugucagggucaguaa

SEQ ID NO: 19047 - RNA, 19 nt, artificial
  Oligomer
gugugauuacuaugcucua

SEQ ID NO: 19048 - RNA, 19 nt, artificial
  Oligomer
ccaucuucuguauucugga

SEQ ID NO: 19049 - RNA, 19 nt, artificial
  Oligomer
ugagguauacuuaggcaaa

SEQ ID NO: 19050 - RNA, 19 nt, artificial
  Oligomer
cagucucugcccaaacaua

SEQ ID NO: 19051 - RNA, 19 nt, artificial
  Oligomer
acggaauuaggaagaccaa

SEQ ID NO: 19052 - RNA, 19 nt, artificial
  Oligomer
ucagggucaguaaggaaaa

SEQ ID NO: 19053 - RNA, 19 nt, artificial
  Oligomer
gggacuuauguauuuauga

SEQ ID NO: 19054 - RNA, 19 nt, artificial
  Oligomer
agugaacagaccaagaaaa

SEQ ID NO: 19055 - RNA, 19 nt, artificial
  Oligomer
ccaagaauucaacuaucga

SEQ ID NO: 19056 - RNA, 19 nt, artificial
  Oligomer
gugaaagaaccaaaagaga

SEQ ID NO: 19057 - RNA, 19 nt, artificial
  Oligomer
cccuguuucucuugaagaa

SEQ ID NO: 19058 - RNA, 19 nt, artificial
  Oligomer
ggcagagauagaaccugga

SEQ ID NO: 19059 - RNA, 19 nt, artificial
  Oligomer
aggagaggcagagauagaa

SEQ ID NO: 19060 - RNA, 19 nt, artificial
  Oligomer
cccugauguuacgagcaau

SEQ ID NO: 19061 - RNA, 19 nt, artificial
  Oligomer
guguuuugcuaagaaccaa

SEQ ID NO: 19062 - RNA, 19 nt, artificial
  Oligomer
gaaugauucgcauccacca

SEQ ID NO: 19063 - RNA, 19 nt, artificial
  Oligomer
gaaccaaaagagaucacaa

SEQ ID NO: 19064 - RNA, 19 nt, artificial
  Oligomer
cuaucugggcuguugcuaa

SEQ ID NO: 19065 - RNA, 19 nt, artificial
  Oligomer
cuugaaacauagagaucua

SEQ ID NO: 19066 - RNA, 19 nt, artificial
  Oligomer
ccugauguuacgagcaaua

SEQ ID NO: 19067 - RNA, 19 nt, artificial
  Oligomer
ugcagaaaucucaagauaa

SEQ ID NO: 19068 - RNA, 19 nt, artificial
  Oligomer
ggacaagggcuuguaucaa

SEQ ID NO: 19069 - RNA, 19 nt, artificial
  Oligomer
gcacaaguuuugauucgga

SEQ ID NO: 19070 - RNA, 19 nt, artificial
  Oligomer
cuuccagaaggcaaaaaga

SEQ ID NO: 19071 - RNA, 19 nt, artificial
  Oligomer
caaccagaggaaacuugca

SEQ ID NO: 19072 - RNA, 19 nt, artificial
  Oligomer
gauagaaccuggagccacu

SEQ ID NO: 19073 - RNA, 19 nt, artificial
  Oligomer
cucugaagauucaagcuua

SEQ ID NO: 19074 - RNA, 19 nt, artificial
  Oligomer
cuggaaaacugccuuuuau

SEQ ID NO: 19075 - RNA, 19 nt, artificial
  Oligomer
ccagaaggcaaaaagacau

SEQ ID NO: 19076 - RNA, 19 nt, artificial
  Oligomer
gaccaagaaaagagaaaaa

SEQ ID NO: 19077 - RNA, 19 nt, artificial
  Oligomer
ggacccugagacuucacaa

SEQ ID NO: 19078 - RNA, 19 nt, artificial
  Oligomer
aaguauaugggccgcacaa

SEQ ID NO: 19079 - RNA, 19 nt, artificial
  Oligomer
caaguauaugggccgcaca

SEQ ID NO: 19080 - RNA, 19 nt, artificial
  Oligomer
ggaagcugugaaagaacca

SEQ ID NO: 19081 - RNA, 19 nt, artificial
  Oligomer
cgaguaugaugguguuaug

SEQ ID NO: 19082 - RNA, 19 nt, artificial
  Oligomer
guaucauccaucacaaaaa

SEQ ID NO: 19083 - RNA, 19 nt, artificial
  Oligomer
aguguucauuccaaguaua

SEQ ID NO: 19084 - RNA, 19 nt, artificial
  Oligomer
caaggguuauagacugcca

SEQ ID NO: 19085 - RNA, 19 nt, artificial
  Oligomer
cuagcaaauuugaguugga

SEQ ID NO: 19086 - RNA, 19 nt, artificial
  Oligomer
cugugaaagaaccaaaaga

SEQ ID NO: 19087 - RNA, 19 nt, artificial
  Oligomer
aagaguaaagcccauacaa

SEQ ID NO: 19088 - RNA, 19 nt, artificial
  Oligomer
acaucuucaugcgacaaaa

SEQ ID NO: 19089 - RNA, 19 nt, artificial
  Oligomer
gcccagcguguuuuuaaaa

SEQ ID NO: 19090 - RNA, 19 nt, artificial
  Oligomer
ugaugguguuaugcagaaa

SEQ ID NO: 19091 - RNA, 19 nt, artificial
  Oligomer
acgguuacccagaaccuaa

SEQ ID NO: 19092 - RNA, 19 nt, artificial
  Oligomer
ccugagugagcuaguagua

SEQ ID NO: 19093 - RNA, 19 nt, artificial
  Oligomer
augagcagaccaaccuaaa

SEQ ID NO: 19094 - RNA, 19 nt, artificial
  Oligomer
uaaggaaaacgguggccua

SEQ ID NO: 19095 - RNA, 19 nt, artificial
  Oligomer
agaucagauucuucucuua

SEQ ID NO: 19096 - RNA, 19 nt, artificial
  Oligomer
gguuuucugucuaauucua

SEQ ID NO: 19097 - RNA, 19 nt, artificial
  Oligomer
gaaauuugacaguguucau

SEQ ID NO: 19098 - RNA, 19 nt, artificial
  Oligomer
uauacuuaggcaaagagaa

SEQ ID NO: 19099 - RNA, 19 nt, artificial
  Oligomer
cuugguucugaaugaggua

SEQ ID NO: 19100 - RNA, 19 nt, artificial
  Oligomer
gaagcugugaaagaaccaa

SEQ ID NO: 19101 - RNA, 19 nt, artificial
  Oligomer
cuaggguacaggcaacaau

SEQ ID NO: 19102 - RNA, 19 nt, artificial
  Oligomer
ccuuuuaucugcccagaau

SEQ ID NO: 19103 - RNA, 19 nt, artificial
  Oligomer
accugaaagaucugaugaa

SEQ ID NO: 19104 - RNA, 19 nt, artificial
  Oligomer
aagagagugaacagaccaa

SEQ ID NO: 19105 - RNA, 19 nt, artificial
  Oligomer
gugaugguuuucugucuaa

SEQ ID NO: 19106 - RNA, 19 nt, artificial
  Oligomer
cugccaugccaauuugcaa

SEQ ID NO: 19107 - RNA, 19 nt, artificial
  Oligomer
gucagggucaguaaggaaa

SEQ ID NO: 19108 - RNA, 19 nt, artificial
  Oligomer
gaccaauaccuccuccaga

SEQ ID NO: 19109 - RNA, 19 nt, artificial
  Oligomer
ccaacacaauggagaggga

SEQ ID NO: 19110 - RNA, 19 nt, artificial
  Oligomer
guguuaugcagaaaucuca

SEQ ID NO: 19111 - RNA, 19 nt, artificial
  Oligomer
guuggacccugagacuuca

SEQ ID NO: 19112 - RNA, 19 nt, artificial
  Oligomer
auacuuaggcaaagagaaa

SEQ ID NO: 19113 - RNA, 19 nt, artificial
  Oligomer
cucuaaggugggaucacua

SEQ ID NO: 19114 - RNA, 19 nt, artificial
  Oligomer
ggaugucaucuuccuggaa

SEQ ID NO: 19115 - RNA, 19 nt, artificial
  Oligomer
caaguuauugggaugucau

SEQ ID NO: 19116 - RNA, 19 nt, artificial
  Oligomer
aagcugugaaagaaccaaa

SEQ ID NO: 19117 - RNA, 19 nt, artificial
  Oligomer
ggaaaaugccagagcuugu

SEQ ID NO: 19118 - RNA, 19 nt, artificial
  Oligomer
ugagcagaccaaccuaaau

SEQ ID NO: 19119 - RNA, 19 nt, artificial
  Oligomer
ugucagggucaguaaggaa

SEQ ID NO: 19120 - RNA, 19 nt, artificial
  Oligomer
agagugaacagaccaagaa

SEQ ID NO: 19121 - RNA, 19 nt, artificial
  Oligomer
ggcuuguaucaauguauca

SEQ ID NO: 19122 - RNA, 19 nt, artificial
  Oligomer
guauacuuaggcaaagaga

SEQ ID NO: 19123 - RNA, 19 nt, artificial
  Oligomer
ugcaaacucucaaaaccaa

SEQ ID NO: 19124 - RNA, 19 nt, artificial
  Oligomer
gggcuguugcuaauauuga

SEQ ID NO: 19125 - RNA, 19 nt, artificial
  Oligomer
cugucagggucaguaagga

SEQ ID NO: 19126 - RNA, 19 nt, artificial
  Oligomer
aauggcucaugaccuggaa

SEQ ID NO: 19127 - RNA, 19 nt, artificial
  Oligomer
caacacaauggagagggaa

SEQ ID NO: 19128 - RNA, 19 nt, artificial
  Oligomer
cacgguuacccagaaccua

SEQ ID NO: 19129 - RNA, 19 nt, artificial
  Oligomer
caaccugaaauaguaccaa

SEQ ID NO: 19130 - RNA, 19 nt, artificial
  Oligomer
acaaaaagcccacaggaau

SEQ ID NO: 19131 - RNA, 19 nt, artificial
  Oligomer
ugcccaaacauaaagagaa

SEQ ID NO: 19132 - RNA, 19 nt, artificial
  Oligomer
cugggagaaaugacuuuga

SEQ ID NO: 19133 - RNA, 19 nt, artificial
  Oligomer
ggaaacuugcauacagaga

SEQ ID NO: 19134 - RNA, 19 nt, artificial
  Oligomer
gagccaucaccuugauaau

SEQ ID NO: 19135 - RNA, 19 nt, artificial
  Oligomer
ccauaguggagagaacuga

SEQ ID NO: 19136 - RNA, 19 nt, artificial
  Oligomer
ggucaguaaggaaaacggu

SEQ ID NO: 19137 - RNA, 19 nt, artificial
  Oligomer
uguguguaccugugacuaa

SEQ ID NO: 19138 - RNA, 19 nt, artificial
  Oligomer
auuucuuccagaaggcaaa

SEQ ID NO: 19139 - RNA, 19 nt, artificial
  Oligomer
aagacaucuucaugcgaca

SEQ ID NO: 19140 - RNA, 19 nt, artificial
  Oligomer
gugaacagaccaagaaaag

SEQ ID NO: 19141 - RNA, 19 nt, artificial
  Oligomer
aaauguggaaccaacacaa

SEQ ID NO: 19142 - RNA, 19 nt, artificial
  Oligomer
guaugaugguguuaugcag

SEQ ID NO: 19143 - RNA, 19 nt, artificial
  Oligomer
ggaaaacuugguucugaau

SEQ ID NO: 19144 - RNA, 19 nt, artificial
  Oligomer
caggaaaacuugguucuga

SEQ ID NO: 19145 - RNA, 19 nt, artificial
  Oligomer
gagccugagccacaaaaau

SEQ ID NO: 19146 - RNA, 19 nt, artificial
  Oligomer
cuugauccacagaaauaca

SEQ ID NO: 19147 - RNA, 19 nt, artificial
  Oligomer
cagucugggugggacuuau

SEQ ID NO: 19148 - RNA, 19 nt, artificial
  Oligomer
gauuucuuccagaaggcaa

SEQ ID NO: 19149 - RNA, 19 nt, artificial
  Oligomer
cuaugggacugaguaacau

SEQ ID NO: 19150 - RNA, 19 nt, artificial
  Oligomer
uggagagggaagagaguga

SEQ ID NO: 19151 - RNA, 19 nt, artificial
  Oligomer
ggaaccaacacaauggaga

SEQ ID NO: 19152 - RNA, 19 nt, artificial
  Oligomer
gacaagacgcggcuuuuau

SEQ ID NO: 19153 - RNA, 19 nt, artificial
  Oligomer
cccacaggaaugauucgca

SEQ ID NO: 19154 - RNA, 19 nt, artificial
  Oligomer
uaggcaaagagaaauuuga

SEQ ID NO: 19155 - RNA, 19 nt, artificial
  Oligomer
ucugaaugagguauacuua

SEQ ID NO: 19156 - RNA, 19 nt, artificial
  Oligomer
ccacaaaaauguuccuuua

SEQ ID NO: 19157 - RNA, 19 nt, artificial
  Oligomer
ucaucuuccuggaagcaga

SEQ ID NO: 19158 - RNA, 19 nt, artificial
  Oligomer
cuugaaacaagcaacagau

SEQ ID NO: 19159 - RNA, 19 nt, artificial
  Oligomer
gccaauuugcaaacucuca

SEQ ID NO: 19160 - RNA, 19 nt, artificial
  Oligomer
guggagagaacugaauaaa

SEQ ID NO: 19161 - RNA, 19 nt, artificial
  Oligomer
aggguacaggcaacaauga

SEQ ID NO: 19162 - RNA, 19 nt, artificial
  Oligomer
uguaccugugacuaaacaa

SEQ ID NO: 19163 - RNA, 19 nt, artificial
  Oligomer
guggaauagccucccugua

SEQ ID NO: 19164 - RNA, 19 nt, artificial
  Oligomer
gaacagaccaagaaaagag

SEQ ID NO: 19165 - RNA, 19 nt, artificial
  Oligomer
ggccucgcaacucuuauaa

SEQ ID NO: 19166 - RNA, 19 nt, artificial
  Oligomer
cuuucucuauagagcuuga

SEQ ID NO: 19167 - RNA, 19 nt, artificial
  Oligomer
gaugguguuaugcagaaau

SEQ ID NO: 19168 - RNA, 19 nt, artificial
  Oligomer
aacugucagugcuugcuaa

SEQ ID NO: 19169 - RNA, 19 nt, artificial
  Oligomer
gggccgcacaaguuuugau

SEQ ID NO: 19170 - RNA, 19 nt, artificial
  Oligomer
ggcaggaccaggaaaacuu

SEQ ID NO: 19171 - RNA, 19 nt, artificial
  Oligomer
acaagcuuguccauguaau

SEQ ID NO: 19172 - RNA, 19 nt, artificial
  Oligomer
agacugccaugcuagacaa

SEQ ID NO: 19173 - RNA, 19 nt, artificial
  Oligomer
uauagacugccaugcuaga

SEQ ID NO: 19174 - RNA, 19 nt, artificial
  Oligomer
gagugagcuaguaguauuu

SEQ ID NO: 19175 - RNA, 19 nt, artificial
  Oligomer
cuuugaaaaccuggcucua

SEQ ID NO: 19176 - RNA, 19 nt, artificial
  Oligomer
ucaaggcaaccagaggaaa

SEQ ID NO: 19177 - RNA, 19 nt, artificial
  Oligomer
ggacauaagacagacagca

SEQ ID NO: 19178 - RNA, 19 nt, artificial
  Oligomer
gauagucuguccaaaugga

SEQ ID NO: 19179 - RNA, 19 nt, artificial
  Oligomer
agauggauagucuguccaa

SEQ ID NO: 19180 - RNA, 19 nt, artificial
  Oligomer
uaguggagagaacugaaua

SEQ ID NO: 19181 - RNA, 19 nt, artificial
  Oligomer
caaugagacugcagaccug

SEQ ID NO: 19182 - RNA, 19 nt, artificial
  Oligomer
cugggcuguugcuaauauu

SEQ ID NO: 19183 - RNA, 19 nt, artificial
  Oligomer
cugggugggacuuauguau

SEQ ID NO: 19184 - RNA, 19 nt, artificial
  Oligomer
gacuaaacaacuaccuccu

SEQ ID NO: 19185 - RNA, 19 nt, artificial
  Oligomer
aagacauuaccaugaguaa

SEQ ID NO: 19186 - RNA, 19 nt, artificial
  Oligomer
ccagcguguuuuuaaaagu

SEQ ID NO: 19187 - RNA, 19 nt, artificial
  Oligomer
aagcccagcguguuuuuaa

SEQ ID NO: 19188 - RNA, 19 nt, artificial
  Oligomer
gaagagagugaacagacca

SEQ ID NO: 19189 - RNA, 19 nt, artificial
  Oligomer
ggaagagagugaacagacc

SEQ ID NO: 19190 - RNA, 19 nt, artificial
  Oligomer
caacucuuauaaaugugga

SEQ ID NO: 19191 - RNA, 19 nt, artificial
  Oligomer
augaguguuuugcuaagaa

SEQ ID NO: 19192 - RNA, 19 nt, artificial
  Oligomer
ccagaaccuaagaagauga

SEQ ID NO: 19193 - RNA, 19 nt, artificial
  Oligomer
caaggacaagggcuuguau

SEQ ID NO: 19194 - RNA, 19 nt, artificial
  Oligomer
uugacaguguucauuccaa

SEQ ID NO: 19195 - RNA, 19 nt, artificial
  Oligomer
agguauacuuaggcaaaga

SEQ ID NO: 19196 - RNA, 19 nt, artificial
  Oligomer
agcugcaacggaauuagga

SEQ ID NO: 19197 - RNA, 19 nt, artificial
  Oligomer
ggaggcuuaggacuuucca

SEQ ID NO: 19198 - RNA, 19 nt, artificial
  Oligomer
ggagagccaucaccuugau

SEQ ID NO: 19199 - RNA, 19 nt, artificial
  Oligomer
ucuggaaaacugccuuuua

SEQ ID NO: 19200 - RNA, 19 nt, artificial
  Oligomer
cuucaugcgacaaaaguga

SEQ ID NO: 19201 - RNA, 19 nt, artificial
  Oligomer
uauaaauguggaaccaaca

SEQ ID NO: 19202 - RNA, 19 nt, artificial
  Oligomer
gaugguuuucugucuaauu

SEQ ID NO: 19203 - RNA, 19 nt, artificial
  Oligomer
gcuugcuaacuucagucaa

SEQ ID NO: 19204 - RNA, 19 nt, artificial
  Oligomer
gaacugucagugcuugcua

SEQ ID NO: 19205 - RNA, 19 nt, artificial
  Oligomer
guauaugggccgcacaagu

SEQ ID NO: 19206 - RNA, 19 nt, artificial
  Oligomer
gcaggaccaggaaaacuug

SEQ ID NO: 19207 - RNA, 19 nt, artificial
  Oligomer
aggugggaucacuaaggga

SEQ ID NO: 19208 - RNA, 19 nt, artificial
  Oligomer
ucuaaggugggaucacuaa

SEQ ID NO: 19209 - RNA, 19 nt, artificial
  Oligomer
accagaggaaacuugcaua

SEQ ID NO: 19210 - RNA, 19 nt, artificial
  Oligomer
ugaguuggaugauuguuuu

SEQ ID NO: 19211 - RNA, 19 nt, artificial
  Oligomer
gggaugucaucuuccugga

SEQ ID NO: 19212 - RNA, 19 nt, artificial
  Oligomer
ggcuguugcuaauauugag

SEQ ID NO: 19213 - RNA, 19 nt, artificial
  Oligomer
cacuucagagcacacuuau

SEQ ID NO: 19214 - RNA, 19 nt, artificial
  Oligomer
ugccaagaggagacuuuaa

SEQ ID NO: 19215 - RNA, 19 nt, artificial
  Oligomer
caaaaagacauuaccauga

SEQ ID NO: 19216 - RNA, 19 nt, artificial
  Oligomer
ccugggcaaccuuuuugau

SEQ ID NO: 19217 - RNA, 19 nt, artificial
  Oligomer
uuuguaaguuccugggcaa

SEQ ID NO: 19218 - RNA, 19 nt, artificial
  Oligomer
aguaaagcccauacaagua

SEQ ID NO: 19219 - RNA, 19 nt, artificial
  Oligomer
agaugaguguuuugcuaag

SEQ ID NO: 19220 - RNA, 19 nt, artificial
  Oligomer
cuaagaagaugaguguuuu

SEQ ID NO: 19221 - RNA, 19 nt, artificial
  Oligomer
ucacaaaaagcccacagga

SEQ ID NO: 19222 - RNA, 19 nt, artificial
  Oligomer
ccaucacaaaaagcccaca

SEQ ID NO: 19223 - RNA, 19 nt, artificial
  Oligomer
ggcaaagagaaauuugaca

SEQ ID NO: 19224 - RNA, 19 nt, artificial
  Oligomer
agacagauauacugggaga

SEQ ID NO: 19225 - RNA, 19 nt, artificial
  Oligomer
ccaaguuauugggauguca

SEQ ID NO: 19226 - RNA, 19 nt, artificial
  Oligomer
accaaaagagaucacaaua

SEQ ID NO: 19227 - RNA, 19 nt, artificial
  Oligomer
auuaggagaggcagagaua

SEQ ID NO: 19228 - RNA, 19 nt, artificial
  Oligomer
aaugagcagaccaaccuaa

SEQ ID NO: 19229 - RNA, 19 nt, artificial
  Oligomer
ucugggugggacuuaugua

SEQ ID NO: 19230 - RNA, 19 nt, artificial
  Oligomer
gccuuuuaucugcccagaa

SEQ ID NO: 19231 - RNA, 19 nt, artificial
  Oligomer
ccucucaauuucuggaaaa

SEQ ID NO: 19232 - RNA, 19 nt, artificial
  Oligomer
cuuuguaaguuccugggca

SEQ ID NO: 19233 - RNA, 19 nt, artificial
  Oligomer
cagcguguuuuuaaaaguu

SEQ ID NO: 19234 - RNA, 19 nt, artificial
  Oligomer
gacgcggcuuuuaucuuca

SEQ ID NO: 19235 - RNA, 19 nt, artificial
  Oligomer
ugacaagacgcggcuuuua

SEQ ID NO: 19236 - RNA, 19 nt, artificial
  Oligomer
aucucaagauaaugucaca

SEQ ID NO: 19237 - RNA, 19 nt, artificial
  Oligomer
agucucugcccaaacauaa

SEQ ID NO: 19238 - RNA, 19 nt, artificial
  Oligomer
aaacuugcauacagagaca

SEQ ID NO: 19239 - RNA, 19 nt, artificial
  Oligomer
uuaggaagaccaagacaca

SEQ ID NO: 19240 - RNA, 19 nt, artificial
  Oligomer
caagucuugaaacaagcaa

SEQ ID NO: 19241 - RNA, 19 nt, artificial
  Oligomer
uaggagaggcagagauaga

SEQ ID NO: 19242 - RNA, 19 nt, artificial
  Oligomer
guguaccugugacuaaaca

SEQ ID NO: 19243 - RNA, 19 nt, artificial
  Oligomer
ggacucccucuaaguggaa

SEQ ID NO: 19244 - RNA, 19 nt, artificial
  Oligomer
agcccauacaaguauucau

SEQ ID NO: 19245 - RNA, 19 nt, artificial
  Oligomer
cguguuuuuaaaaguucga

SEQ ID NO: 19246 - RNA, 19 nt, artificial
  Oligomer
cuuauaaauguggaaccaa

SEQ ID NO: 19247 - RNA, 19 nt, artificial
  Oligomer
ugaugguuuucugucuaau

SEQ ID NO: 19248 - RNA, 19 nt, artificial
  Oligomer
gauuacagcuguacuucca

SEQ ID NO: 19249 - RNA, 19 nt, artificial
  Oligomer
guauucuggaaacugacaa

SEQ ID NO: 19250 - RNA, 19 nt, artificial
  Oligomer
agugcuugcuaacuucagu

SEQ ID NO: 19251 - RNA, 19 nt, artificial
  Oligomer
auguaucauccaucacaaa

SEQ ID NO: 19252 - RNA, 19 nt, artificial
  Oligomer
agggcuuguaucaauguau

SEQ ID NO: 19253 - RNA, 19 nt, artificial
  Oligomer
aggacaagggcuuguauca

SEQ ID NO: 19254 - RNA, 19 nt, artificial
  Oligomer
gguucugaaugagguauac

SEQ ID NO: 19255 - RNA, 19 nt, artificial
  Oligomer
cagauauacugggagaaau

SEQ ID NO: 19256 - RNA, 19 nt, artificial
  Oligomer
aauggaaggaggcuuagga

SEQ ID NO: 19257 - RNA, 19 nt, artificial
  Oligomer
uggugauacccaaguuauu

SEQ ID NO: 19258 - RNA, 19 nt, artificial
  Oligomer
ggagaggcagagauagaac

SEQ ID NO: 19259 - RNA, 19 nt, artificial
  Oligomer
ccugcuaaggaguucucau

SEQ ID NO: 19260 - RNA, 19 nt, artificial
  Oligomer
uagagaucuauguacugua

SEQ ID NO: 19261 - RNA, 19 nt, artificial
  Oligomer
gugggacuuauguauuuau

SEQ ID NO: 19262 - RNA, 19 nt, artificial
  Oligomer
ucugucuaauucuauggaa

SEQ ID NO: 19263 - RNA, 19 nt, artificial
  Oligomer
cauaaauuugaccugcuca

SEQ ID NO: 19264 - RNA, 19 nt, artificial
  Oligomer
agacaagcuuguccaugua

SEQ ID NO: 19265 - RNA, 19 nt, artificial
  Oligomer
gacagauauacugggagaa

SEQ ID NO: 19266 - RNA, 19 nt, artificial
  Oligomer
acuugcauacagagacaga

SEQ ID NO: 19267 - RNA, 19 nt, artificial
  Oligomer
uguccaaauggacauaaga

SEQ ID NO: 19268 - RNA, 19 nt, artificial
  Oligomer
gauuacuaugcucuagaga

SEQ ID NO: 19269 - RNA, 19 nt, artificial
  Oligomer
gaauuuuguguguaccugu

SEQ ID NO: 19270 - RNA, 19 nt, artificial
  Oligomer
cuuuuugauuucuuccaga

SEQ ID NO: 19271 - RNA, 19 nt, artificial
  Oligomer
gacugaguaacauucucuu

SEQ ID NO: 19272 - RNA, 19 nt, artificial
  Oligomer
ucaugcgacaaaagugaua

SEQ ID NO: 19273 - RNA, 19 nt, artificial
  Oligomer
cgaagacaucuucaugcga

SEQ ID NO: 19274 - RNA, 19 nt, artificial
  Oligomer
acacaauggagagggaaga

SEQ ID NO: 19275 - RNA, 19 nt, artificial
  Oligomer
ucuguauucuggaaacuga

SEQ ID NO: 19276 - RNA, 19 nt, artificial
  Oligomer
augaugguguuaugcagaa

SEQ ID NO: 19277 - RNA, 19 nt, artificial
  Oligomer
uaacuucagucaaccugaa

SEQ ID NO: 19278 - RNA, 19 nt, artificial
  Oligomer
ugccaugccaauuugcaaa

SEQ ID NO: 19279 - RNA, 19 nt, artificial
  Oligomer
aaaugccagagcuugugaa

SEQ ID NO: 19280 - RNA, 19 nt, artificial
  Oligomer
caggaaaaugccagagcuu

SEQ ID NO: 19281 - RNA, 19 nt, artificial
  Oligomer
aguucucaucccucuguca

SEQ ID NO: 19282 - RNA, 19 nt, artificial
  Oligomer
ggcaaaaagacauuaccau

SEQ ID NO: 19283 - RNA, 19 nt, artificial
  Oligomer
gcccauacaaguauucauu

SEQ ID NO: 19284 - RNA, 19 nt, artificial
  Oligomer
uggaaauggaagaagaaga

SEQ ID NO: 19285 - RNA, 19 nt, artificial
  Oligomer
ugugaugguuuucugucua

SEQ ID NO: 19286 - RNA, 19 nt, artificial
  Oligomer
auaugaccaucuucuguau

SEQ ID NO: 19287 - RNA, 19 nt, artificial
  Oligomer
aaccugaaauaguaccaau

SEQ ID NO: 19288 - RNA, 19 nt, artificial
  Oligomer
gacaagggcuuguaucaau

SEQ ID NO: 19289 - RNA, 19 nt, artificial
  Oligomer
aucuucagaucaaggacaa

SEQ ID NO: 19290 - RNA, 19 nt, artificial
  Oligomer
ugacaguguucauuccaag

SEQ ID NO: 19291 - RNA, 19 nt, artificial
  Oligomer
gcuagacaagcuuguccau

SEQ ID NO: 19292 - RNA, 19 nt, artificial
  Oligomer
cuugcauacagagacagau

SEQ ID NO: 19293 - RNA, 19 nt, artificial
  Oligomer
ggaugaauggaaggaggcu

SEQ ID NO: 19294 - RNA, 19 nt, artificial
  Oligomer
ugaaagaaccaaaagagau

SEQ ID NO: 19295 - RNA, 19 nt, artificial
  Oligomer
caacaagccauaguggaga

SEQ ID NO: 19296 - RNA, 19 nt, artificial
  Oligomer
ggguacaggcaacaaugag

SEQ ID NO: 19297 - RNA, 19 nt, artificial
  Oligomer
uacuaugcucuagagaaaa

SEQ ID NO: 19298 - RNA, 19 nt, artificial
  Oligomer
cagaaggcaaaaagacauu

SEQ ID NO: 19299 - RNA, 19 nt, artificial
  Oligomer
ucuacccuuuccuuuguaa

SEQ ID NO: 19300 - RNA, 19 nt, artificial
  Oligomer
agagggaagagagugaaca

SEQ ID NO: 19301 - RNA, 19 nt, artificial
  Oligomer
caauggagagggaagagag

SEQ ID NO: 19302 - RNA, 19 nt, artificial
  Oligomer
gcuguacuuccaacaguua

SEQ ID NO: 19303 - RNA, 19 nt, artificial
  Oligomer
agaccacauuccuuggauu

SEQ ID NO: 19304 - RNA, 19 nt, artificial
  Oligomer
uuaucuucaccuuucucua

SEQ ID NO: 19305 - RNA, 19 nt, artificial
  Oligomer
cuguauucuggaaacugac

SEQ ID NO: 19306 - RNA, 19 nt, artificial
  Oligomer
guuuugcuaagaaccaaga

SEQ ID NO: 19307 - RNA, 19 nt, artificial
  Oligomer
gaugaguguuuugcuaaga

SEQ ID NO: 19308 - RNA, 19 nt, artificial
  Oligomer
ccugaaauaguaccaauuu

SEQ ID NO: 19309 - RNA, 19 nt, artificial
  Oligomer
aagggcuuguaucaaugua

SEQ ID NO: 19310 - RNA, 19 nt, artificial
  Oligomer
ggccgcacaaguuuugauu

SEQ ID NO: 19311 - RNA, 19 nt, artificial
  Oligomer
ccuggcuaguuucuaacau

SEQ ID NO: 19312 - RNA, 19 nt, artificial
  Oligomer
gguuauagacugccaugcu

SEQ ID NO: 19313 - RNA, 19 nt, artificial
  Oligomer
aaggguuauagacugccau

SEQ ID NO: 19314 - RNA, 19 nt, artificial
  Oligomer
auagggcuagcaaauuuga

SEQ ID NO: 19315 - RNA, 19 nt, artificial
  Oligomer
ugauaaugggaugaaugga

SEQ ID NO: 19316 - RNA, 19 nt, artificial
  Oligomer
agucuugaaacaagcaaca

SEQ ID NO: 19317 - RNA, 19 nt, artificial
  Oligomer
ucaacaagucuugaaacaa

SEQ ID NO: 19318 - RNA, 19 nt, artificial
  Oligomer
gggaaauuaggagaggcag

SEQ ID NO: 19319 - RNA, 19 nt, artificial
  Oligomer
caacaaugagcagaccaac

SEQ ID NO: 19320 - RNA, 19 nt, artificial
  Oligomer
ccuaggguacaggcaacaa

SEQ ID NO: 19321 - RNA, 19 nt, artificial
  Oligomer
aaaacgguggccuagggua

SEQ ID NO: 19322 - RNA, 19 nt, artificial
  Oligomer
auuacuaugcucuagagaa

SEQ ID NO: 19323 - RNA, 19 nt, artificial
  Oligomer
gagaucuauguacuguaau

SEQ ID NO: 19324 - RNA, 19 nt, artificial
  Oligomer
acugcuucuuuucacuuca

SEQ ID NO: 19325 - RNA, 19 nt, artificial
  Oligomer
aggagacuuuaauucucuu

SEQ ID NO: 19326 - RNA, 19 nt, artificial
  Oligomer
augccaagaggagacuuua

SEQ ID NO: 19327 - RNA, 19 nt, artificial
  Oligomer
gaagcccagcguguuuuua

SEQ ID NO: 19328 - RNA, 19 nt, artificial
  Oligomer
ccugaaagaucugaugaag

SEQ ID NO: 19329 - RNA, 19 nt, artificial
  Oligomer
gagggaagagagugaacag

SEQ ID NO: 19330 - RNA, 19 nt, artificial
  Oligomer
gagagggaagagagugaac

SEQ ID NO: 19331 - RNA, 19 nt, artificial
  Oligomer
gugugaugguuuucugucu

SEQ ID NO: 19332 - RNA, 19 nt, artificial
  Oligomer
uccuuggauuacagcugua

SEQ ID NO: 19333 - RNA, 19 nt, artificial
  Oligomer
augcagaaaucucaagaua

SEQ ID NO: 19334 - RNA, 19 nt, artificial
  Oligomer
aguguuuugcuaagaacca

SEQ ID NO: 19335 - RNA, 19 nt, artificial
  Oligomer
cuaacuucagucaaccuga

SEQ ID NO: 19336 - RNA, 19 nt, artificial
  Oligomer
uucgcauccaccagaugaa

SEQ ID NO: 19337 - RNA, 19 nt, artificial
  Oligomer
aauguaucauccaucacaa

SEQ ID NO: 19338 - RNA, 19 nt, artificial
  Oligomer
caauguaucauccaucaca

SEQ ID NO: 19339 - RNA, 19 nt, artificial
  Oligomer
uucacaaucuucagaucaa

SEQ ID NO: 19340 - RNA, 19 nt, artificial
  Oligomer
ugguucugaaugagguaua

SEQ ID NO: 19341 - RNA, 19 nt, artificial
  Oligomer
aaaacuugguucugaauga

SEQ ID NO: 19342 - RNA, 19 nt, artificial
  Oligomer
cagaggaaacuugcauaca

SEQ ID NO: 19343 - RNA, 19 nt, artificial
  Oligomer
cggaauuaggaagaccaag

SEQ ID NO: 19344 - RNA, 19 nt, artificial
  Oligomer
ugcucuagagaaaagucua

SEQ ID NO: 19345 - RNA, 19 nt, artificial
  Oligomer
uuaucugcccagaauucua

SEQ ID NO: 19346 - RNA, 19 nt, artificial
  Oligomer
ggaaaacugccuuuuaucu

SEQ ID NO: 19347 - RNA, 19 nt, artificial
  Oligomer
ggcucaugaccuggaaaua

SEQ ID NO: 19348 - RNA, 19 nt, artificial
  Oligomer
gaauagccucccuguaacu

SEQ ID NO: 19349 - RNA, 19 nt, artificial
  Oligomer
aauccauauaccugaaaga

SEQ ID NO: 19350 - RNA, 19 nt, artificial
  Oligomer
gaaccaacacaauggagag

SEQ ID NO: 19351 - RNA, 19 nt, artificial
  Oligomer
uuuugcuaagaaccaagaa

SEQ ID NO: 19352 - RNA, 19 nt, artificial
  Oligomer
agaagaugaguguuuugcu

SEQ ID NO: 19353 - RNA, 19 nt, artificial
  Oligomer
gguuacccagaaccuaaga

SEQ ID NO: 19354 - RNA, 19 nt, artificial
  Oligomer
acaaguuuugauucggaca

SEQ ID NO: 19355 - RNA, 19 nt, artificial
  Oligomer
guguucauuccaaguauau

SEQ ID NO: 19356 - RNA, 19 nt, artificial
  Oligomer
uuuuggcaggaccaggaaa

SEQ ID NO: 19357 - RNA, 19 nt, artificial
  Oligomer
uguaaacccucaaggguua

SEQ ID NO: 19358 - RNA, 19 nt, artificial
  Oligomer
cugagugagcuaguaguau

SEQ ID NO: 19359 - RNA, 19 nt, artificial
  Oligomer
gccugagugagcuaguagu

SEQ ID NO: 19360 - RNA, 19 nt, artificial
  Oligomer
uugcauacagagacagaua

SEQ ID NO: 19361 - RNA, 19 nt, artificial
  Oligomer
ggcuuacuuagccuacaga

SEQ ID NO: 19362 - RNA, 19 nt, artificial
  Oligomer
gauccacagaaauacauga

SEQ ID NO: 19363 - RNA, 19 nt, artificial
  Oligomer
gagaacugaauaaacagga

SEQ ID NO: 19364 - RNA, 19 nt, artificial
  Oligomer
gggucaguaaggaaaacgg

SEQ ID NO: 19365 - RNA, 19 nt, artificial
  Oligomer
gugauuacuaugcucuaga

SEQ ID NO: 19366 - RNA, 19 nt, artificial
  Oligomer
cuauguacuguaauagugu

SEQ ID NO: 19367 - RNA, 19 nt, artificial
  Oligomer
ugcuucuuuucacuucaga

SEQ ID NO: 19368 - RNA, 19 nt, artificial
  Oligomer
gccaagaggagacuuuaau

SEQ ID NO: 19369 - RNA, 19 nt, artificial
  Oligomer
gcaaaaagacauuaccaug

SEQ ID NO: 19370 - RNA, 19 nt, artificial
  Oligomer
guuccugggcaaccuuuuu

SEQ ID NO: 19371 - RNA, 19 nt, artificial
  Oligomer
auuacagcuguacuuccaa

SEQ ID NO: 19372 - RNA, 19 nt, artificial
  Oligomer
cugacaagacgcggcuuuu

SEQ ID NO: 19373 - RNA, 19 nt, artificial
  Oligomer
guuucauucccugauguua

SEQ ID NO: 19374 - RNA, 19 nt, artificial
  Oligomer
aagaugaguguuuugcuaa

SEQ ID NO: 19375 - RNA, 19 nt, artificial
  Oligomer
uacccagaaccuaagaaga

SEQ ID NO: 19376 - RNA, 19 nt, artificial
  Oligomer
cgguuacccagaaccuaag

SEQ ID NO: 19377 - RNA, 19 nt, artificial
  Oligomer
gagguauacuuaggcaaag

SEQ ID NO: 19378 - RNA, 19 nt, artificial
  Oligomer
augagguauacuuaggcaa

SEQ ID NO: 19379 - RNA, 19 nt, artificial
  Oligomer
acuugguucugaaugaggu

SEQ ID NO: 19380 - RNA, 19 nt, artificial
  Oligomer
agcuaguaguauuuuggca

SEQ ID NO: 19381 - RNA, 19 nt, artificial
  Oligomer
ccugagccacaaaaauguu

SEQ ID NO: 19382 - RNA, 19 nt, artificial
  Oligomer
gggcuagcaaauuugaguu

SEQ ID NO: 19383 - RNA, 19 nt, artificial
  Oligomer
cuacagauguccuacggga

SEQ ID NO: 19384 - RNA, 19 nt, artificial
  Oligomer
ugagagaggaagagcugca

SEQ ID NO: 19385 - RNA, 19 nt, artificial
  Oligomer
augaauggaaggaggcuua

SEQ ID NO: 19386 - RNA, 19 nt, artificial
  Oligomer
ccaaauggacauaagacag

SEQ ID NO: 19387 - RNA, 19 nt, artificial
  Oligomer
uggagagaacugaauaaac

SEQ ID NO: 19388 - RNA, 19 nt, artificial
  Oligomer
ucugaagauucaagcuuau

SEQ ID NO: 19389 - RNA, 19 nt, artificial
  Oligomer
cuaaacaacuaccuccuca

SEQ ID NO: 19390 - RNA, 19 nt, artificial
  Oligomer
auggcucaugaccuggaaa

SEQ ID NO: 19391 - RNA, 19 nt, artificial
  Oligomer
gcuucuuuucacuucagag

SEQ ID NO: 19392 - RNA, 19 nt, artificial
  Oligomer
cuuuaauucucuuacugcu

SEQ ID NO: 19393 - RNA, 19 nt, artificial
  Oligomer
aguggaauagccucccugu

SEQ ID NO: 19394 - RNA, 19 nt, artificial
  Oligomer
aggacucccucuaagugga

SEQ ID NO: 19395 - RNA, 19 nt, artificial
  Oligomer
agaaggcaaaaagacauua

SEQ ID NO: 19396 - RNA, 19 nt, artificial
  Oligomer
cagaccacauuccuuggau

SEQ ID NO: 19397 - RNA, 19 nt, artificial
  Oligomer
caauaugaccaucuucugu

SEQ ID NO: 19398 - RNA, 19 nt, artificial
  Oligomer
gcaauaugaccaucuucug

SEQ ID NO: 19399 - RNA, 19 nt, artificial
  Oligomer
guaucaauguaucauccau

SEQ ID NO: 19400 - RNA, 19 nt, artificial
  Oligomer
gcuuguaucaauguaucau

SEQ ID NO: 19401 - RNA, 19 nt, artificial
  Oligomer
gacaguguucauuccaagu

SEQ ID NO: 19402 - RNA, 19 nt, artificial
  Oligomer
auuuuggcaggaccaggaa

SEQ ID NO: 19403 - RNA, 19 nt, artificial
  Oligomer
gagaaaugacuuugaaaac

SEQ ID NO: 19404 - RNA, 19 nt, artificial
  Oligomer
ccaaagccugagugagcua

SEQ ID NO: 19405 - RNA, 19 nt, artificial
  Oligomer
cauaagacagacagcaguu

SEQ ID NO: 19406 - RNA, 19 nt, artificial
  Oligomer
acauaagacagacagcagu

SEQ ID NO: 19407 - RNA, 19 nt, artificial
  Oligomer
caagcaacagauggauagu

SEQ ID NO: 19408 - RNA, 19 nt, artificial
  Oligomer
gcuugugaacccuguuucu

SEQ ID NO: 19409 - RNA, 19 nt, artificial
  Oligomer
caagccauaguggagagaa

SEQ ID NO: 19410 - RNA, 19 nt, artificial
  Oligomer
ccuggagccacuucuaucu

SEQ ID NO: 19411 - RNA, 19 nt, artificial
  Oligomer
aaauuaggagaggcagaga

SEQ ID NO: 19412 - RNA, 19 nt, artificial
  Oligomer
cugugacuaaacaacuacc

SEQ ID NO: 19413 - RNA, 19 nt, artificial
  Oligomer
gaccucucaauuucuggaa

SEQ ID NO: 19414 - RNA, 19 nt, artificial
  Oligomer
aaaagacauuaccaugagu

SEQ ID NO: 19415 - RNA, 19 nt, artificial
  Oligomer
cccauacaaguauucauuu

SEQ ID NO: 19416 - RNA, 19 nt, artificial
  Oligomer
gcgacaaaagugauacaug

SEQ ID NO: 19417 - RNA, 19 nt, artificial
  Oligomer
aauguggaaccaacacaau

SEQ ID NO: 19418 - RNA, 19 nt, artificial
  Oligomer
cagcuguacuuccaacagu

SEQ ID NO: 19419 - RNA, 19 nt, artificial
  Oligomer
cuuuuaucuucaccuuucu

SEQ ID NO: 19420 - RNA, 19 nt, artificial
  Oligomer
cggcuuuuaucuucaccuu

SEQ ID NO: 19421 - RNA, 19 nt, artificial
  Oligomer
caagaauucaacuaucgag

SEQ ID NO: 19422 - RNA, 19 nt, artificial
  Oligomer
cuauacacgguuacccaga

SEQ ID NO: 19423 - RNA, 19 nt, artificial
  Oligomer
uuuggcaggaccaggaaaa

SEQ ID NO: 19424 - RNA, 19 nt, artificial
  Oligomer
ccucaaggguuauagacug

SEQ ID NO: 19425 - RNA, 19 nt, artificial
  Oligomer
gccugagccacaaaaaugu

SEQ ID NO: 19426 - RNA, 19 nt, artificial
  Oligomer
gcccaaacauaaagagaac

SEQ ID NO: 19427 - RNA, 19 nt, artificial
  Oligomer
ggugggaucacuaagggau

SEQ ID NO: 19428 - RNA, 19 nt, artificial
  Oligomer
agggcuagcaaauuugagu

SEQ ID NO: 19429 - RNA, 19 nt, artificial
  Oligomer
gcuuacuuagccuacagau

SEQ ID NO: 19430 - RNA, 19 nt, artificial
  Oligomer
aauuaggaagaccaagaca

SEQ ID NO: 19431 - RNA, 19 nt, artificial
  Oligomer
aauggacauaagacagaca

SEQ ID NO: 19432 - RNA, 19 nt, artificial
  Oligomer
caacaagucuugaaacaag

SEQ ID NO: 19433 - RNA, 19 nt, artificial
  Oligomer
ugaagaacugacuagugag

SEQ ID NO: 19434 - RNA, 19 nt, artificial
  Oligomer
uaaacaggaaaaugccaga

SEQ ID NO: 19435 - RNA, 19 nt, artificial
  Oligomer
gagauagaaccuggagcca

SEQ ID NO: 19436 - RNA, 19 nt, artificial
  Oligomer
auuucaaugagacugcaga

SEQ ID NO: 19437 - RNA, 19 nt, artificial
  Oligomer
cagggucaguaaggaaaac

SEQ ID NO: 19438 - RNA, 19 nt, artificial
  Oligomer
cuuuuaucugcccagaauu

SEQ ID NO: 19439 - RNA, 19 nt, artificial
  Oligomer
agcccagcuuaauggcuca

SEQ ID NO: 19440 - RNA, 19 nt, artificial
  Oligomer
uccagaaggcaaaaagaca

SEQ ID NO: 19441 - RNA, 19 nt, artificial
  Oligomer
auuaaagaguaaagcccau

SEQ ID NO: 19442 - RNA, 19 nt, artificial
  Oligomer
gacaaaagugauacauguu

SEQ ID NO: 19443 - RNA, 19 nt, artificial
  Oligomer
acuaugggacugaguaaca

SEQ ID NO: 19444 - RNA, 19 nt, artificial
  Oligomer
aauggagagggaagagagu

SEQ ID NO: 19445 - RNA, 19 nt, artificial
  Oligomer
agcuguacuuccaacaguu

SEQ ID NO: 19446 - RNA, 19 nt, artificial
  Oligomer
uguauucuggaaacugaca

SEQ ID NO: 19447 - RNA, 19 nt, artificial
  Oligomer
accugaaauaguaccaauu

SEQ ID NO: 19448 - RNA, 19 nt, artificial
  Oligomer
cagugcuugcuaacuucag

SEQ ID NO: 19449 - RNA, 19 nt, artificial
  Oligomer
caggaaugauucgcaucca

SEQ ID NO: 19450 - RNA, 19 nt, artificial
  Oligomer
ccugagacuucacaaucuu

SEQ ID NO: 19451 - RNA, 19 nt, artificial
  Oligomer
cugaaugagguauacuuag

SEQ ID NO: 19452 - RNA, 19 nt, artificial
  Oligomer
uaacauguuuugugcagca

SEQ ID NO: 19453 - RNA, 19 nt, artificial
  Oligomer
ccuugauuagacuccuagc

SEQ ID NO: 19454 - RNA, 19 nt, artificial
  Oligomer
agagacagauauacuggga

SEQ ID NO: 19455 - RNA, 19 nt, artificial
  Oligomer
gaguuggaugauuguuuuu

SEQ ID NO: 19456 - RNA, 19 nt, artificial
  Oligomer
caaauuugaguuggaugau

SEQ ID NO: 19457 - RNA, 19 nt, artificial
  Oligomer
aaaaccaaagccugaguga

SEQ ID NO: 19458 - RNA, 19 nt, artificial
  Oligomer
uacagauguccuacgggaa

SEQ ID NO: 19459 - RNA, 19 nt, artificial
  Oligomer
uccacagaaauacaugaaa

SEQ ID NO: 19460 - RNA, 19 nt, artificial
  Oligomer
aauaaacaggaaaaugcca

SEQ ID NO: 19461 - RNA, 19 nt, artificial
  Oligomer
agcagaccaaccuaaauuu

SEQ ID NO: 19462 - RNA, 19 nt, artificial
  Oligomer
accucucaauuucuggaaa

SEQ ID NO: 19463 - RNA, 19 nt, artificial
  Oligomer
agaccucucaauuucugga

SEQ ID NO: 19464 - RNA, 19 nt, artificial
  Oligomer
gacauuaccaugaguaaua

SEQ ID NO: 19465 - RNA, 19 nt, artificial
  Oligomer
gcaaccuuuuugauuucuu

SEQ ID NO: 19466 - RNA, 19 nt, artificial
  Oligomer
uccugggcaaccuuuuuga

SEQ ID NO: 19467 - RNA, 19 nt, artificial
  Oligomer
agggaagagagugaacaga

SEQ ID NO: 19468 - RNA, 19 nt, artificial
  Oligomer
cacauuccuuggauuacag

SEQ ID NO: 19469 - RNA, 19 nt, artificial
  Oligomer
cuucaccuuucucuauaga

SEQ ID NO: 19470 - RNA, 19 nt, artificial
  Oligomer
ugauguuacgagcaauaug

SEQ ID NO: 19471 - RNA, 19 nt, artificial
  Oligomer
caagauaaugucacagaac

SEQ ID NO: 19472 - RNA, 19 nt, artificial
  Oligomer
cuucagucaaccugaaaua

SEQ ID NO: 19473 - RNA, 19 nt, artificial
  Oligomer
caaaaagcccacaggaaug

SEQ ID NO: 19474 - RNA, 19 nt, artificial
  Oligomer
caagggcuuguaucaaugu

SEQ ID NO: 19475 - RNA, 19 nt, artificial
  Oligomer
ggaccaggaaaacuugguu

SEQ ID NO: 19476 - RNA, 19 nt, artificial
  Oligomer
agauauacugggagaaaug

SEQ ID NO: 19477 - RNA, 19 nt, artificial
  Oligomer
acagauauacugggagaaa

SEQ ID NO: 19478 - RNA, 19 nt, artificial
  Oligomer
cucaaggcaaccagaggaa

SEQ ID NO: 19479 - RNA, 19 nt, artificial
  Oligomer
gaauuaggaagaccaagac

SEQ ID NO: 19480 - RNA, 19 nt, artificial
  Oligomer
agagccaucaccuugauaa

SEQ ID NO: 19481 - RNA, 19 nt, artificial
  Oligomer
gagagccaucaccuugaua

SEQ ID NO: 19482 - RNA, 19 nt, artificial
  Oligomer
gcugugaaagaaccaaaag

SEQ ID NO: 19483 - RNA, 19 nt, artificial
  Oligomer
ccugccaugccaauuugca

SEQ ID NO: 19484 - RNA, 19 nt, artificial
  Oligomer
ugugaacccuguuucucuu

SEQ ID NO: 19485 - RNA, 19 nt, artificial
  Oligomer
cagagcuugugaacccugu

SEQ ID NO: 19486 - RNA, 19 nt, artificial
  Oligomer
cccaacaagccauagugga

SEQ ID NO: 19487 - RNA, 19 nt, artificial
  Oligomer
gucugggugggacuuaugu

SEQ ID NO: 19488 - RNA, 19 nt, artificial
  Oligomer
gugacuaaacaacuaccuc

SEQ ID NO: 19489 - RNA, 19 nt, artificial
  Oligomer
agagcacacuuaugggcca

SEQ ID NO: 19490 - RNA, 19 nt, artificial
  Oligomer
cuuacugcuucuuuucacu

SEQ ID NO: 19491 - RNA, 19 nt, artificial
  Oligomer
aggcaaaaagacauuacca

SEQ ID NO: 19492 - RNA, 19 nt, artificial
  Oligomer
aaagaguaaagcccauaca

SEQ ID NO: 19493 - RNA, 19 nt, artificial
  Oligomer
guggaaccaacacaaugga

SEQ ID NO: 19494 - RNA, 19 nt, artificial
  Oligomer
uuucaaagucauuucuccc

SEQ ID NO: 19495 - RNA, 19 nt, artificial
  Oligomer
uuucuuggucuguucacuc

SEQ ID NO: 19496 - RNA, 19 nt, artificial
  Oligomer
uuggguaucaccaaaaccc

SEQ ID NO: 19497 - RNA, 19 nt, artificial
  Oligomer
uuucucuuuucuuggucug

SEQ ID NO: 19498 - RNA, 19 nt, artificial
  Oligomer
uucaguucucuccacuaug

SEQ ID NO: 19499 - RNA, 19 nt, artificial
  Oligomer
uuuucucuuuucuuggucu

SEQ ID NO: 19500 - RNA, 19 nt, artificial
  Oligomer
uucagaaccaaguuuuccu

SEQ ID NO: 19501 - RNA, 19 nt, artificial
  Oligomer
uuuuuguggcucaggcucc

SEQ ID NO: 19502 - RNA, 19 nt, artificial
  Oligomer
uuugcuagcccuaugcugg

SEQ ID NO: 19503 - RNA, 19 nt, artificial
  Oligomer
uuuuauuuccaggucauga

SEQ ID NO: 19504 - RNA, 19 nt, artificial
  Oligomer
uuuaaaaacacgcugggcu

SEQ ID NO: 19505 - RNA, 19 nt, artificial
  Oligomer
auuaucuugagauuucugc

SEQ ID NO: 19506 - RNA, 19 nt, artificial
  Oligomer
auuccguugcagcucuucc

SEQ ID NO: 19507 - RNA, 19 nt, artificial
  Oligomer
uuuagucacagguacacac

SEQ ID NO: 19508 - RNA, 19 nt, artificial
  Oligomer
uuuucaaagucauuucucc

SEQ ID NO: 19509 - RNA, 19 nt, artificial
  Oligomer
uuccuaauuccguugcagc

SEQ ID NO: 19510 - RNA, 19 nt, artificial
  Oligomer
uuggucugcucauuguugc

SEQ ID NO: 19511 - RNA, 19 nt, artificial
  Oligomer
uuuugguucuuucacagcu

SEQ ID NO: 19512 - RNA, 19 nt, artificial
  Oligomer
uuccguugcagcucuuccu

SEQ ID NO: 19513 - RNA, 19 nt, artificial
  Oligomer
auucaucccauuaucaagg

SEQ ID NO: 19514 - RNA, 19 nt, artificial
  Oligomer
uagguuggucugcucauug

SEQ ID NO: 19515 - RNA, 19 nt, artificial
  Oligomer
uuuccauagaauuagacag

SEQ ID NO: 19516 - RNA, 19 nt, artificial
  Oligomer
uugagcaaaaacaaucauc

SEQ ID NO: 19517 - RNA, 19 nt, artificial
  Oligomer
uuuggacagacuauccauc

SEQ ID NO: 19518 - RNA, 19 nt, artificial
  Oligomer
uuucaagacuuguugaugg

SEQ ID NO: 19519 - RNA, 19 nt, artificial
  Oligomer
ucugccucuccuaauuucc

SEQ ID NO: 19520 - RNA, 19 nt, artificial
  Oligomer
uaguuguuuagucacaggu

SEQ ID NO: 19521 - RNA, 19 nt, artificial
  Oligomer
augcgaaucauuccugugg

SEQ ID NO: 19522 - RNA, 19 nt, artificial
  Oligomer
uuugagaguuugcaaauug

SEQ ID NO: 19523 - RNA, 19 nt, artificial
  Oligomer
ucuuggucuguucacucuc

SEQ ID NO: 19524 - RNA, 19 nt, artificial
  Oligomer
ugagcaaaaacaaucaucc

SEQ ID NO: 19525 - RNA, 19 nt, artificial
  Oligomer
ucucauugaaauaagcuug

SEQ ID NO: 19526 - RNA, 19 nt, artificial
  Oligomer
ucaugagccauuaagcugg

SEQ ID NO: 19527 - RNA, 19 nt, artificial
  Oligomer
uucacucucuucccucucc

SEQ ID NO: 19528 - RNA, 19 nt, artificial
  Oligomer
uuuauaagaguugcgaggc

SEQ ID NO: 19529 - RNA, 19 nt, artificial
  Oligomer
uuccugugggcuuuuugug

SEQ ID NO: 19530 - RNA, 19 nt, artificial
  Oligomer
aucugugucuuggucuucc

SEQ ID NO: 19531 - RNA, 19 nt, artificial
  Oligomer
uucucuuuucuuggucugu

SEQ ID NO: 19532 - RNA, 19 nt, artificial
  Oligomer
ucucuuuucuuggucuguu

SEQ ID NO: 19533 - RNA, 19 nt, artificial
  Oligomer
ucuuuucuuggucuguuca

SEQ ID NO: 19534 - RNA, 19 nt, artificial
  Oligomer
auacuuggaaugaacacug

SEQ ID NO: 19535 - RNA, 19 nt, artificial
  Oligomer
uauaagaguugcgaggccg

SEQ ID NO: 19536 - RNA, 19 nt, artificial
  Oligomer
uugagauuucugcauaaca

SEQ ID NO: 19537 - RNA, 19 nt, artificial
  Oligomer
uuuauguuugggcagagac

SEQ ID NO: 19538 - RNA, 19 nt, artificial
  Oligomer
uugcagcucuuccucucuc

SEQ ID NO: 19539 - RNA, 19 nt, artificial
  Oligomer
uugagaguuugcaaauugg

SEQ ID NO: 19540 - RNA, 19 nt, artificial
  Oligomer
uucuucuuccauuuccaua

SEQ ID NO: 19541 - RNA, 19 nt, artificial
  Oligomer
uugaauucuugguucuuag

SEQ ID NO: 19542 - RNA, 19 nt, artificial
  Oligomer
uucagaauucaucuggugg

SEQ ID NO: 19543 - RNA, 19 nt, artificial
  Oligomer
uuugguuuugagaguuugc

SEQ ID NO: 19544 - RNA, 19 nt, artificial
  Oligomer
uuccuguuuauucaguucu

SEQ ID NO: 19545 - RNA, 19 nt, artificial
  Oligomer
uuauucaguucucuccacu

SEQ ID NO: 19546 - RNA, 19 nt, artificial
  Oligomer
uuacugacccugacagagg

SEQ ID NO: 19547 - RNA, 19 nt, artificial
  Oligomer
uagagcauaguaaucacac

SEQ ID NO: 19548 - RNA, 19 nt, artificial
  Oligomer
uccagaauacagaagaugg

SEQ ID NO: 19549 - RNA, 19 nt, artificial
  Oligomer
uuugccuaaguauaccuca

SEQ ID NO: 19550 - RNA, 19 nt, artificial
  Oligomer
uauguuugggcagagacug

SEQ ID NO: 19551 - RNA, 19 nt, artificial
  Oligomer
uuggucuuccuaauuccgu

SEQ ID NO: 19552 - RNA, 19 nt, artificial
  Oligomer
uuuuccuuacugacccuga

SEQ ID NO: 19553 - RNA, 19 nt, artificial
  Oligomer
ucauaaauacauaaguccc

SEQ ID NO: 19554 - RNA, 19 nt, artificial
  Oligomer
uuuucuuggucuguucacu

SEQ ID NO: 19555 - RNA, 19 nt, artificial
  Oligomer
ucgauaguugaauucuugg

SEQ ID NO: 19556 - RNA, 19 nt, artificial
  Oligomer
ucucuuuugguucuuucac

SEQ ID NO: 19557 - RNA, 19 nt, artificial
  Oligomer
uucuucaagagaaacaggg

SEQ ID NO: 19558 - RNA, 19 nt, artificial
  Oligomer
uccagguucuaucucugcc

SEQ ID NO: 19559 - RNA, 19 nt, artificial
  Oligomer
uucuaucucugccucuccu

SEQ ID NO: 19560 - RNA, 19 nt, artificial
  Oligomer
auugcucguaacaucaggg

SEQ ID NO: 19561 - RNA, 19 nt, artificial
  Oligomer
uugguucuuagcaaaacac

SEQ ID NO: 19562 - RNA, 19 nt, artificial
  Oligomer
ugguggaugcgaaucauuc

SEQ ID NO: 19563 - RNA, 19 nt, artificial
  Oligomer
uugugaucucuuuugguuc

SEQ ID NO: 19564 - RNA, 19 nt, artificial
  Oligomer
uuagcaacagcccagauag

SEQ ID NO: 19565 - RNA, 19 nt, artificial
  Oligomer
uagaucucuauguuucaag

SEQ ID NO: 19566 - RNA, 19 nt, artificial
  Oligomer
uauugcucguaacaucagg

SEQ ID NO: 19567 - RNA, 19 nt, artificial
  Oligomer
uuaucuugagauuucugca

SEQ ID NO: 19568 - RNA, 19 nt, artificial
  Oligomer
uugauacaagcccuugucc

SEQ ID NO: 19569 - RNA, 19 nt, artificial
  Oligomer
uccgaaucaaaacuugugc

SEQ ID NO: 19570 - RNA, 19 nt, artificial
  Oligomer
ucuuuuugccuucuggaag

SEQ ID NO: 19571 - RNA, 19 nt, artificial
  Oligomer
ugcaaguuuccucugguug

SEQ ID NO: 19572 - RNA, 19 nt, artificial
  Oligomer
aguggcuccagguucuauc

SEQ ID NO: 19573 - RNA, 19 nt, artificial
  Oligomer
uaagcuugaaucuucagag

SEQ ID NO: 19574 - RNA, 19 nt, artificial
  Oligomer
auaaaaggcaguuuuccag

SEQ ID NO: 19575 - RNA, 19 nt, artificial
  Oligomer
augucuuuuugccuucugg

SEQ ID NO: 19576 - RNA, 19 nt, artificial
  Oligomer
uuuuucucuuuucuugguc

SEQ ID NO: 19577 - RNA, 19 nt, artificial
  Oligomer
uugugaagucucagggucc

SEQ ID NO: 19578 - RNA, 19 nt, artificial
  Oligomer
uugugcggcccauauacuu

SEQ ID NO: 19579 - RNA, 19 nt, artificial
  Oligomer
ugugcggcccauauacuug

SEQ ID NO: 19580 - RNA, 19 nt, artificial
  Oligomer
ugguucuuucacagcuucc

SEQ ID NO: 19581 - RNA, 19 nt, artificial
  Oligomer
cauaacaccaucauacucg

SEQ ID NO: 19582 - RNA, 19 nt, artificial
  Oligomer
uuuuugugauggaugauac

SEQ ID NO: 19583 - RNA, 19 nt, artificial
  Oligomer
uauacuuggaaugaacacu

SEQ ID NO: 19584 - RNA, 19 nt, artificial
  Oligomer
uggcagucuauaacccuug

SEQ ID NO: 19585 - RNA, 19 nt, artificial
  Oligomer
uccaacucaaauuugcuag

SEQ ID NO: 19586 - RNA, 19 nt, artificial
  Oligomer
ucuuuugguucuuucacag

SEQ ID NO: 19587 - RNA, 19 nt, artificial
  Oligomer
uuguaugggcuuuacucuu

SEQ ID NO: 19588 - RNA, 19 nt, artificial
  Oligomer
uuuugucgcaugaagaugu

SEQ ID NO: 19589 - RNA, 19 nt, artificial
  Oligomer
uuuuaaaaacacgcugggc

SEQ ID NO: 19590 - RNA, 19 nt, artificial
  Oligomer
uuucugcauaacaccauca

SEQ ID NO: 19591 - RNA, 19 nt, artificial
  Oligomer
uuagguucuggguaaccgu

SEQ ID NO: 19592 - RNA, 19 nt, artificial
  Oligomer
uacuacuagcucacucagg

SEQ ID NO: 19593 - RNA, 19 nt, artificial
  Oligomer
uuuagguuggucugcucau

SEQ ID NO: 19594 - RNA, 19 nt, artificial
  Oligomer
uaggccaccguuuuccuua

SEQ ID NO: 19595 - RNA, 19 nt, artificial
  Oligomer
uaagagaagaaucugaucu

SEQ ID NO: 19596 - RNA, 19 nt, artificial
  Oligomer
uagaauuagacagaaaacc

SEQ ID NO: 19597 - RNA, 19 nt, artificial
  Oligomer
augaacacugucaaauuuc

SEQ ID NO: 19598 - RNA, 19 nt, artificial
  Oligomer
uucucuuugccuaaguaua

SEQ ID NO: 19599 - RNA, 19 nt, artificial
  Oligomer
uaccucauucagaaccaag

SEQ ID NO: 19600 - RNA, 19 nt, artificial
  Oligomer
uugguucuuucacagcuuc

SEQ ID NO: 19601 - RNA, 19 nt, artificial
  Oligomer
auuguugccuguacccuag

SEQ ID NO: 19602 - RNA, 19 nt, artificial
  Oligomer
auucugggcagauaaaagg

SEQ ID NO: 19603 - RNA, 19 nt, artificial
  Oligomer
uucaucagaucuuucaggu

SEQ ID NO: 19604 - RNA, 19 nt, artificial
  Oligomer
uuggucuguucacucucuu

SEQ ID NO: 19605 - RNA, 19 nt, artificial
  Oligomer
uuagacagaaaaccaucac

SEQ ID NO: 19606 - RNA, 19 nt, artificial
  Oligomer
uugcaaauuggcauggcag

SEQ ID NO: 19607 - RNA, 19 nt, artificial
  Oligomer
uuuccuuacugacccugac

SEQ ID NO: 19608 - RNA, 19 nt, artificial
  Oligomer
ucuggaggagguauugguc

SEQ ID NO: 19609 - RNA, 19 nt, artificial
  Oligomer
ucccucuccauuguguugg

SEQ ID NO: 19610 - RNA, 19 nt, artificial
  Oligomer
ugagauuucugcauaacac

SEQ ID NO: 19611 - RNA, 19 nt, artificial
  Oligomer
ugaagucucaggguccaac

SEQ ID NO: 19612 - RNA, 19 nt, artificial
  Oligomer
uuucucuuugccuaaguau

SEQ ID NO: 19613 - RNA, 19 nt, artificial
  Oligomer
uagugaucccaccuuagag

SEQ ID NO: 19614 - RNA, 19 nt, artificial
  Oligomer
uuccaggaagaugacaucc

SEQ ID NO: 19615 - RNA, 19 nt, artificial
  Oligomer
augacaucccaauaacuug

SEQ ID NO: 19616 - RNA, 19 nt, artificial
  Oligomer
uuugguucuuucacagcuu

SEQ ID NO: 19617 - RNA, 19 nt, artificial
  Oligomer
acaagcucuggcauuuucc

SEQ ID NO: 19618 - RNA, 19 nt, artificial
  Oligomer
auuuagguuggucugcuca

SEQ ID NO: 19619 - RNA, 19 nt, artificial
  Oligomer
uuccuuacugacccugaca

SEQ ID NO: 19620 - RNA, 19 nt, artificial
  Oligomer
uucuuggucuguucacucu

SEQ ID NO: 19621 - RNA, 19 nt, artificial
  Oligomer
ugauacauugauacaagcc

SEQ ID NO: 19622 - RNA, 19 nt, artificial
  Oligomer
ucucuuugccuaaguauac

SEQ ID NO: 19623 - RNA, 19 nt, artificial
  Oligomer
uugguuuugagaguuugca

SEQ ID NO: 19624 - RNA, 19 nt, artificial
  Oligomer
ucaauauuagcaacagccc

SEQ ID NO: 19625 - RNA, 19 nt, artificial
  Oligomer
uccuuacugacccugacag

SEQ ID NO: 19626 - RNA, 19 nt, artificial
  Oligomer
uuccaggucaugagccauu

SEQ ID NO: 19627 - RNA, 19 nt, artificial
  Oligomer
uucccucuccauuguguug

SEQ ID NO: 19628 - RNA, 19 nt, artificial
  Oligomer
uagguucuggguaaccgug

SEQ ID NO: 19629 - RNA, 19 nt, artificial
  Oligomer
uugguacuauuucagguug

SEQ ID NO: 19630 - RNA, 19 nt, artificial
  Oligomer
auuccugugggcuuuuugu

SEQ ID NO: 19631 - RNA, 19 nt, artificial
  Oligomer
uucucuuuauguuugggca

SEQ ID NO: 19632 - RNA, 19 nt, artificial
  Oligomer
ucaaagucauuucucccag

SEQ ID NO: 19633 - RNA, 19 nt, artificial
  Oligomer
ucucuguaugcaaguuucc

SEQ ID NO: 19634 - RNA, 19 nt, artificial
  Oligomer
auuaucaaggugauggcuc

SEQ ID NO: 19635 - RNA, 19 nt, artificial
  Oligomer
ucaguucucuccacuaugg

SEQ ID NO: 19636 - RNA, 19 nt, artificial
  Oligomer
accguuuuccuuacugacc

SEQ ID NO: 19637 - RNA, 19 nt, artificial
  Oligomer
uuagucacagguacacaca

SEQ ID NO: 19638 - RNA, 19 nt, artificial
  Oligomer
uuugccuucuggaagaaau

SEQ ID NO: 19639 - RNA, 19 nt, artificial
  Oligomer
ugucgcaugaagaugucuu

SEQ ID NO: 19640 - RNA, 19 nt, artificial
  Oligomer
cuuuucuuggucuguucac

SEQ ID NO: 19641 - RNA, 19 nt, artificial
  Oligomer
uuguguugguuccacauuu

SEQ ID NO: 19642 - RNA, 19 nt, artificial
  Oligomer
cugcauaacaccaucauac

SEQ ID NO: 19643 - RNA, 19 nt, artificial
  Oligomer
auucagaaccaaguuuucc

SEQ ID NO: 19644 - RNA, 19 nt, artificial
  Oligomer
ucagaaccaaguuuuccug

SEQ ID NO: 19645 - RNA, 19 nt, artificial
  Oligomer
auuuuuguggcucaggcuc

SEQ ID NO: 19646 - RNA, 19 nt, artificial
  Oligomer
uguauuucuguggaucaag

SEQ ID NO: 19647 - RNA, 19 nt, artificial
  Oligomer
auaagucccacccagacug

SEQ ID NO: 19648 - RNA, 19 nt, artificial
  Oligomer
uugccuucuggaagaaauc

SEQ ID NO: 19649 - RNA, 19 nt, artificial
  Oligomer
auguuacucagucccauag

SEQ ID NO: 19650 - RNA, 19 nt, artificial
  Oligomer
ucacucucuucccucucca

SEQ ID NO: 19651 - RNA, 19 nt, artificial
  Oligomer
ucuccauuguguugguucc

SEQ ID NO: 19652 - RNA, 19 nt, artificial
  Oligomer
auaaaagccgcgucuuguc

SEQ ID NO: 19653 - RNA, 19 nt, artificial
  Oligomer
ugcgaaucauuccuguggg

SEQ ID NO: 19654 - RNA, 19 nt, artificial
  Oligomer
ucaaauuucucuuugccua

SEQ ID NO: 19655 - RNA, 19 nt, artificial
  Oligomer
uaaguauaccucauucaga

SEQ ID NO: 19656 - RNA, 19 nt, artificial
  Oligomer
uaaaggaacauuuuugugg

SEQ ID NO: 19657 - RNA, 19 nt, artificial
  Oligomer
ucugcuuccaggaagauga

SEQ ID NO: 19658 - RNA, 19 nt, artificial
  Oligomer
aucuguugcuuguuucaag

SEQ ID NO: 19659 - RNA, 19 nt, artificial
  Oligomer
ugagaguuugcaaauuggc

SEQ ID NO: 19660 - RNA, 19 nt, artificial
  Oligomer
uuuauucaguucucuccac

SEQ ID NO: 19661 - RNA, 19 nt, artificial
  Oligomer
ucauuguugccuguacccu

SEQ ID NO: 19662 - RNA, 19 nt, artificial
  Oligomer
uuguuuagucacagguaca

SEQ ID NO: 19663 - RNA, 19 nt, artificial
  Oligomer
uacagggaggcuauuccac

SEQ ID NO: 19664 - RNA, 19 nt, artificial
  Oligomer
cucuuuucuuggucuguuc

SEQ ID NO: 19665 - RNA, 19 nt, artificial
  Oligomer
uuauaagaguugcgaggcc

SEQ ID NO: 19666 - RNA, 19 nt, artificial
  Oligomer
ucaagcucuauagagaaag

SEQ ID NO: 19667 - RNA, 19 nt, artificial
  Oligomer
auuucugcauaacaccauc

SEQ ID NO: 19668 - RNA, 19 nt, artificial
  Oligomer
uuagcaagcacugacaguu

SEQ ID NO: 19669 - RNA, 19 nt, artificial
  Oligomer
aucaaaacuugugcggccc

SEQ ID NO: 19670 - RNA, 19 nt, artificial
  Oligomer
aaguuuuccugguccugcc

SEQ ID NO: 19671 - RNA, 19 nt, artificial
  Oligomer
auuacauggacaagcuugu

SEQ ID NO: 19672 - RNA, 19 nt, artificial
  Oligomer
uugucuagcauggcagucu

SEQ ID NO: 19673 - RNA, 19 nt, artificial
  Oligomer
ucuagcauggcagucuaua

SEQ ID NO: 19674 - RNA, 19 nt, artificial
  Oligomer
aaauacuacuagcucacuc

SEQ ID NO: 19675 - RNA, 19 nt, artificial
  Oligomer
uagagccagguuuucaaag

SEQ ID NO: 19676 - RNA, 19 nt, artificial
  Oligomer
uuuccucugguugccuuga

SEQ ID NO: 19677 - RNA, 19 nt, artificial
  Oligomer
ugcugucugucuuaugucc

SEQ ID NO: 19678 - RNA, 19 nt, artificial
  Oligomer
uccauuuggacagacuauc

SEQ ID NO: 19679 - RNA, 19 nt, artificial
  Oligomer
uuggacagacuauccaucu

SEQ ID NO: 19680 - RNA, 19 nt, artificial
  Oligomer
uauucaguucucuccacua

SEQ ID NO: 19681 - RNA, 19 nt, artificial
  Oligomer
caggucugcagucucauug

SEQ ID NO: 19682 - RNA, 19 nt, artificial
  Oligomer
aauauuagcaacagcccag

SEQ ID NO: 19683 - RNA, 19 nt, artificial
  Oligomer
auacauaagucccacccag

SEQ ID NO: 19684 - RNA, 19 nt, artificial
  Oligomer
aggagguaguuguuuaguc

SEQ ID NO: 19685 - RNA, 19 nt, artificial
  Oligomer
uuacucaugguaaugucuu

SEQ ID NO: 19686 - RNA, 19 nt, artificial
  Oligomer
acuuuuaaaaacacgcugg

SEQ ID NO: 19687 - RNA, 19 nt, artificial
  Oligomer
uuaaaaacacgcugggcuu

SEQ ID NO: 19688 - RNA, 19 nt, artificial
  Oligomer
uggucuguucacucucuuc

SEQ ID NO: 19689 - RNA, 19 nt, artificial
  Oligomer
ggucuguucacucucuucc

SEQ ID NO: 19690 - RNA, 19 nt, artificial
  Oligomer
uccacauuuauaagaguug

SEQ ID NO: 19691 - RNA, 19 nt, artificial
  Oligomer
uucuuagcaaaacacucau

SEQ ID NO: 19692 - RNA, 19 nt, artificial
  Oligomer
ucaucuucuuagguucugg

SEQ ID NO: 19693 - RNA, 19 nt, artificial
  Oligomer
auacaagcccuuguccuug

SEQ ID NO: 19694 - RNA, 19 nt, artificial
  Oligomer
uuggaaugaacacugucaa

SEQ ID NO: 19695 - RNA, 19 nt, artificial
  Oligomer
ucuuugccuaaguauaccu

SEQ ID NO: 19696 - RNA, 19 nt, artificial
  Oligomer
uccuaauuccguugcagcu

SEQ ID NO: 19697 - RNA, 19 nt, artificial
  Oligomer
uggaaaguccuaagccucc

SEQ ID NO: 19698 - RNA, 19 nt, artificial
  Oligomer
aucaaggugauggcucucc

SEQ ID NO: 19699 - RNA, 19 nt, artificial
  Oligomer
uaaaaggcaguuuuccaga

SEQ ID NO: 19700 - RNA, 19 nt, artificial
  Oligomer
ucacuuuugucgcaugaag

SEQ ID NO: 19701 - RNA, 19 nt, artificial
  Oligomer
uguugguuccacauuuaua

SEQ ID NO: 19702 - RNA, 19 nt, artificial
  Oligomer
aauuagacagaaaaccauc

SEQ ID NO: 19703 - RNA, 19 nt, artificial
  Oligomer
uugacugaaguuagcaagc

SEQ ID NO: 19704 - RNA, 19 nt, artificial
  Oligomer
uagcaagcacugacaguuc

SEQ ID NO: 19705 - RNA, 19 nt, artificial
  Oligomer
acuugugcggcccauauac

SEQ ID NO: 19706 - RNA, 19 nt, artificial
  Oligomer
caaguuuuccugguccugc

SEQ ID NO: 19707 - RNA, 19 nt, artificial
  Oligomer
ucccuuagugaucccaccu

SEQ ID NO: 19708 - RNA, 19 nt, artificial
  Oligomer
uuagugaucccaccuuaga

SEQ ID NO: 19709 - RNA, 19 nt, artificial
  Oligomer
uaugcaaguuuccucuggu

SEQ ID NO: 19710 - RNA, 19 nt, artificial
  Oligomer
aaaacaaucauccaacuca

SEQ ID NO: 19711 - RNA, 19 nt, artificial
  Oligomer
uccaggaagaugacauccc

SEQ ID NO: 19712 - RNA, 19 nt, artificial
  Oligomer
cucaauauuagcaacagcc

SEQ ID NO: 19713 - RNA, 19 nt, artificial
  Oligomer
auaagugugcucugaagug

SEQ ID NO: 19714 - RNA, 19 nt, artificial
  Oligomer
uuaaagucuccucuuggca

SEQ ID NO: 19715 - RNA, 19 nt, artificial
  Oligomer
ucaugguaaugucuuuuug

SEQ ID NO: 19716 - RNA, 19 nt, artificial
  Oligomer
aucaaaaagguugcccagg

SEQ ID NO: 19717 - RNA, 19 nt, artificial
  Oligomer
uugcccaggaacuuacaaa

SEQ ID NO: 19718 - RNA, 19 nt, artificial
  Oligomer
uacuuguaugggcuuuacu

SEQ ID NO: 19719 - RNA, 19 nt, artificial
  Oligomer
cuuagcaaaacacucaucu

SEQ ID NO: 19720 - RNA, 19 nt, artificial
  Oligomer
aaaacacucaucuucuuag

SEQ ID NO: 19721 - RNA, 19 nt, artificial
  Oligomer
uccugugggcuuuuuguga

SEQ ID NO: 19722 - RNA, 19 nt, artificial
  Oligomer
ugugggcuuuuugugaugg

SEQ ID NO: 19723 - RNA, 19 nt, artificial
  Oligomer
ugucaaauuucucuuugcc

SEQ ID NO: 19724 - RNA, 19 nt, artificial
  Oligomer
ucucccaguauaucugucu

SEQ ID NO: 19725 - RNA, 19 nt, artificial
  Oligomer
ugacaucccaauaacuugg

SEQ ID NO: 19726 - RNA, 19 nt, artificial
  Oligomer
uauugugaucucuuuuggu

SEQ ID NO: 19727 - RNA, 19 nt, artificial
  Oligomer
uaucucugccucuccuaau

SEQ ID NO: 19728 - RNA, 19 nt, artificial
  Oligomer
uuagguuggucugcucauu

SEQ ID NO: 19729 - RNA, 19 nt, artificial
  Oligomer
uacauaagucccacccaga

SEQ ID NO: 19730 - RNA, 19 nt, artificial
  Oligomer
uucugggcagauaaaaggc

SEQ ID NO: 19731 - RNA, 19 nt, artificial
  Oligomer
uuuuccagaaauugagagg

SEQ ID NO: 19732 - RNA, 19 nt, artificial
  Oligomer
ugcccaggaacuuacaaag

SEQ ID NO: 19733 - RNA, 19 nt, artificial
  Oligomer
aacuuuuaaaaacacgcug

SEQ ID NO: 19734 - RNA, 19 nt, artificial
  Oligomer
ugaagauaaaagccgcguc

SEQ ID NO: 19735 - RNA, 19 nt, artificial
  Oligomer
uaaaagccgcgucuuguca

SEQ ID NO: 19736 - RNA, 19 nt, artificial
  Oligomer
ugugacauuaucuugagau

SEQ ID NO: 19737 - RNA, 19 nt, artificial
  Oligomer
uuauguuugggcagagacu

SEQ ID NO: 19738 - RNA, 19 nt, artificial
  Oligomer
ugucucuguaugcaaguuu

SEQ ID NO: 19739 - RNA, 19 nt, artificial
  Oligomer
ugugucuuggucuuccuaa

SEQ ID NO: 19740 - RNA, 19 nt, artificial
  Oligomer
uugcuuguuucaagacuug

SEQ ID NO: 19741 - RNA, 19 nt, artificial
  Oligomer
ucuaucucugccucuccua

SEQ ID NO: 19742 - RNA, 19 nt, artificial
  Oligomer
uguuuagucacagguacac

SEQ ID NO: 19743 - RNA, 19 nt, artificial
  Oligomer
uuccacuuagagggagucc

SEQ ID NO: 19744 - RNA, 19 nt, artificial
  Oligomer
augaauacuuguaugggcu

SEQ ID NO: 19745 - RNA, 19 nt, artificial
  Oligomer
ucgaacuuuuaaaaacacg

SEQ ID NO: 19746 - RNA, 19 nt, artificial
  Oligomer
uugguuccacauuuauaag

SEQ ID NO: 19747 - RNA, 19 nt, artificial
  Oligomer
auuagacagaaaaccauca

SEQ ID NO: 19748 - RNA, 19 nt, artificial
  Oligomer
uggaaguacagcuguaauc

SEQ ID NO: 19749 - RNA, 19 nt, artificial
  Oligomer
uugucaguuuccagaauac

SEQ ID NO: 19750 - RNA, 19 nt, artificial
  Oligomer
acugaaguuagcaagcacu

SEQ ID NO: 19751 - RNA, 19 nt, artificial
  Oligomer
uuugugauggaugauacau

SEQ ID NO: 19752 - RNA, 19 nt, artificial
  Oligomer
auacauugauacaagcccu

SEQ ID NO: 19753 - RNA, 19 nt, artificial
  Oligomer
ugauacaagcccuuguccu

SEQ ID NO: 19754 - RNA, 19 nt, artificial
  Oligomer
guauaccucauucagaacc

SEQ ID NO: 19755 - RNA, 19 nt, artificial
  Oligomer
auuucucccaguauaucug

SEQ ID NO: 19756 - RNA, 19 nt, artificial
  Oligomer
uccuaagccuccuuccauu

SEQ ID NO: 19757 - RNA, 19 nt, artificial
  Oligomer
aauaacuuggguaucacca

SEQ ID NO: 19758 - RNA, 19 nt, artificial
  Oligomer
guucuaucucugccucucc

SEQ ID NO: 19759 - RNA, 19 nt, artificial
  Oligomer
augagaacuccuuagcagg

SEQ ID NO: 19760 - RNA, 19 nt, artificial
  Oligomer
uacaguacauagaucucua

SEQ ID NO: 19761 - RNA, 19 nt, artificial
  Oligomer
auaaauacauaagucccac

SEQ ID NO: 19762 - RNA, 19 nt, artificial
  Oligomer
uuccauagaauuagacaga

SEQ ID NO: 19763 - RNA, 19 nt, artificial
  Oligomer
ugagcaggucaaauuuaug

SEQ ID NO: 19764 - RNA, 19 nt, artificial
  Oligomer
uacauggacaagcuugucu

SEQ ID NO: 19765 - RNA, 19 nt, artificial
  Oligomer
uucucccaguauaucuguc

SEQ ID NO: 19766 - RNA, 19 nt, artificial
  Oligomer
ucugucucuguaugcaagu

SEQ ID NO: 19767 - RNA, 19 nt, artificial
  Oligomer
ucuuauguccauuuggaca

SEQ ID NO: 19768 - RNA, 19 nt, artificial
  Oligomer
ucucuagagcauaguaauc

SEQ ID NO: 19769 - RNA, 19 nt, artificial
  Oligomer
acagguacacacaaaauuc

SEQ ID NO: 19770 - RNA, 19 nt, artificial
  Oligomer
ucuggaagaaaucaaaaag

SEQ ID NO: 19771 - RNA, 19 nt, artificial
  Oligomer
aagagaauguuacucaguc

SEQ ID NO: 19772 - RNA, 19 nt, artificial
  Oligomer
uaucacuuuugucgcauga

SEQ ID NO: 19773 - RNA, 19 nt, artificial
  Oligomer
ucgcaugaagaugucuucg

SEQ ID NO: 19774 - RNA, 19 nt, artificial
  Oligomer
ucuucccucuccauugugu

SEQ ID NO: 19775 - RNA, 19 nt, artificial
  Oligomer
ucaguuuccagaauacaga

SEQ ID NO: 19776 - RNA, 19 nt, artificial
  Oligomer
uucugcauaacaccaucau

SEQ ID NO: 19777 - RNA, 19 nt, artificial
  Oligomer
uucagguugacugaaguua

SEQ ID NO: 19778 - RNA, 19 nt, artificial
  Oligomer
uuugcaaauuggcauggca

SEQ ID NO: 19779 - RNA, 19 nt, artificial
  Oligomer
uucacaagcucuggcauuu

SEQ ID NO: 19780 - RNA, 19 nt, artificial
  Oligomer
aagcucuggcauuuuccug

SEQ ID NO: 19781 - RNA, 19 nt, artificial
  Oligomer
ugacagagggaugagaacu

SEQ ID NO: 19782 - RNA, 19 nt, artificial
  Oligomer
augguaaugucuuuuugcc

SEQ ID NO: 19783 - RNA, 19 nt, artificial
  Oligomer
aaugaauacuuguaugggc

SEQ ID NO: 19784 - RNA, 19 nt, artificial
  Oligomer
ucuucuucuuccauuucca

SEQ ID NO: 19785 - RNA, 19 nt, artificial
  Oligomer
uagacagaaaaccaucaca

SEQ ID NO: 19786 - RNA, 19 nt, artificial
  Oligomer
auacagaagauggucauau

SEQ ID NO: 19787 - RNA, 19 nt, artificial
  Oligomer
auugguacuauuucagguu

SEQ ID NO: 19788 - RNA, 19 nt, artificial
  Oligomer
auugauacaagcccuuguc

SEQ ID NO: 19789 - RNA, 19 nt, artificial
  Oligomer
uuguccuugaucugaagau

SEQ ID NO: 19790 - RNA, 19 nt, artificial
  Oligomer
cuuggaaugaacacuguca

SEQ ID NO: 19791 - RNA, 19 nt, artificial
  Oligomer
auggacaagcuugucuagc

SEQ ID NO: 19792 - RNA, 19 nt, artificial
  Oligomer
aucugucucuguaugcaag

SEQ ID NO: 19793 - RNA, 19 nt, artificial
  Oligomer
agccuccuuccauucaucc

SEQ ID NO: 19794 - RNA, 19 nt, artificial
  Oligomer
aucucuuuugguucuuuca

SEQ ID NO: 19795 - RNA, 19 nt, artificial
  Oligomer
ucuccacuauggcuuguug

SEQ ID NO: 19796 - RNA, 19 nt, artificial
  Oligomer
cucauuguugccuguaccc

SEQ ID NO: 19797 - RNA, 19 nt, artificial
  Oligomer
uuuucucuagagcauagua

SEQ ID NO: 19798 - RNA, 19 nt, artificial
  Oligomer
aaugucuuuuugccuucug

SEQ ID NO: 19799 - RNA, 19 nt, artificial
  Oligomer
uuacaaaggaaaggguaga

SEQ ID NO: 19800 - RNA, 19 nt, artificial
  Oligomer
uguucacucucuucccucu

SEQ ID NO: 19801 - RNA, 19 nt, artificial
  Oligomer
cucucuucccucuccauug

SEQ ID NO: 19802 - RNA, 19 nt, artificial
  Oligomer
uaacuguuggaaguacagc

SEQ ID NO: 19803 - RNA, 19 nt, artificial
  Oligomer
aauccaaggaauguggucu

SEQ ID NO: 19804 - RNA, 19 nt, artificial
  Oligomer
uagagaaaggugaagauaa

SEQ ID NO: 19805 - RNA, 19 nt, artificial
  Oligomer
gucaguuuccagaauacag

SEQ ID NO: 19806 - RNA, 19 nt, artificial
  Oligomer
ucuugguucuuagcaaaac

SEQ ID NO: 19807 - RNA, 19 nt, artificial
  Oligomer
ucuuagcaaaacacucauc

SEQ ID NO: 19808 - RNA, 19 nt, artificial
  Oligomer
aaauugguacuauuucagg

SEQ ID NO: 19809 - RNA, 19 nt, artificial
  Oligomer
uacauugauacaagcccuu

SEQ ID NO: 19810 - RNA, 19 nt, artificial
  Oligomer
aaucaaaacuugugcggcc

SEQ ID NO: 19811 - RNA, 19 nt, artificial
  Oligomer
auguuagaaacuagccagg

SEQ ID NO: 19812 - RNA, 19 nt, artificial
  Oligomer
agcauggcagucuauaacc

SEQ ID NO: 19813 - RNA, 19 nt, artificial
  Oligomer
auggcagucuauaacccuu

SEQ ID NO: 19814 - RNA, 19 nt, artificial
  Oligomer
ucaaauuugcuagcccuau

SEQ ID NO: 19815 - RNA, 19 nt, artificial
  Oligomer
uccauucaucccauuauca

SEQ ID NO: 19816 - RNA, 19 nt, artificial
  Oligomer
uguugcuuguuucaagacu

SEQ ID NO: 19817 - RNA, 19 nt, artificial
  Oligomer
uuguuucaagacuuguuga

SEQ ID NO: 19818 - RNA, 19 nt, artificial
  Oligomer
cugccucuccuaauuuccc

SEQ ID NO: 19819 - RNA, 19 nt, artificial
  Oligomer
guuggucugcucauuguug

SEQ ID NO: 19820 - RNA, 19 nt, artificial
  Oligomer
uuguugccuguacccuagg

SEQ ID NO: 19821 - RNA, 19 nt, artificial
  Oligomer
uacccuaggccaccguuuu

SEQ ID NO: 19822 - RNA, 19 nt, artificial
  Oligomer
uucucuagagcauaguaau

SEQ ID NO: 19823 - RNA, 19 nt, artificial
  Oligomer
auuacaguacauagaucuc

SEQ ID NO: 19824 - RNA, 19 nt, artificial
  Oligomer
ugaagugaaaagaagcagu

SEQ ID NO: 19825 - RNA, 19 nt, artificial
  Oligomer
aagagaauuaaagucuccu

SEQ ID NO: 19826 - RNA, 19 nt, artificial
  Oligomer
uaaagucuccucuuggcau

SEQ ID NO: 19827 - RNA, 19 nt, artificial
  Oligomer
uaaaaacacgcugggcuuc

SEQ ID NO: 19828 - RNA, 19 nt, artificial
  Oligomer
cuucaucagaucuuucagg

SEQ ID NO: 19829 - RNA, 19 nt, artificial
  Oligomer
cuguucacucucuucccuc

SEQ ID NO: 19830 - RNA, 19 nt, artificial
  Oligomer
guucacucucuucccucuc

SEQ ID NO: 19831 - RNA, 19 nt, artificial
  Oligomer
agacagaaaaccaucacac

SEQ ID NO: 19832 - RNA, 19 nt, artificial
  Oligomer
uacagcuguaauccaagga

SEQ ID NO: 19833 - RNA, 19 nt, artificial
  Oligomer
uaucuugagauuucugcau

SEQ ID NO: 19834 - RNA, 19 nt, artificial
  Oligomer
ugguucuuagcaaaacacu

SEQ ID NO: 19835 - RNA, 19 nt, artificial
  Oligomer
ucagguugacugaaguuag

SEQ ID NO: 19836 - RNA, 19 nt, artificial
  Oligomer
uucaucugguggaugcgaa

SEQ ID NO: 19837 - RNA, 19 nt, artificial
  Oligomer
uugugauggaugauacauu

SEQ ID NO: 19838 - RNA, 19 nt, artificial
  Oligomer
ugugauggaugauacauug

SEQ ID NO: 19839 - RNA, 19 nt, artificial
  Oligomer
uugaucugaagauugugaa

SEQ ID NO: 19840 - RNA, 19 nt, artificial
  Oligomer
uauaccucauucagaacca

SEQ ID NO: 19841 - RNA, 19 nt, artificial
  Oligomer
ucauucagaaccaaguuuu

SEQ ID NO: 19842 - RNA, 19 nt, artificial
  Oligomer
uguaugcaaguuuccucug

SEQ ID NO: 19843 - RNA, 19 nt, artificial
  Oligomer
cuuggucuuccuaauuccg

SEQ ID NO: 19844 - RNA, 19 nt, artificial
  Oligomer
uagacuuuucucuagagca

SEQ ID NO: 19845 - RNA, 19 nt, artificial
  Oligomer
uagaauucugggcagauaa

SEQ ID NO: 19846 - RNA, 19 nt, artificial
  Oligomer
agauaaaaggcaguuuucc

SEQ ID NO: 19847 - RNA, 19 nt, artificial
  Oligomer
uauuuccaggucaugagcc

SEQ ID NO: 19848 - RNA, 19 nt, artificial
  Oligomer
aguuacagggaggcuauuc

SEQ ID NO: 19849 - RNA, 19 nt, artificial
  Oligomer
ucuuucagguauauggauu

SEQ ID NO: 19850 - RNA, 19 nt, artificial
  Oligomer
cucuccauuguguugguuc

SEQ ID NO: 19851 - RNA, 19 nt, artificial
  Oligomer
uucuugguucuuagcaaaa

SEQ ID NO: 19852 - RNA, 19 nt, artificial
  Oligomer
agcaaaacacucaucuucu

SEQ ID NO: 19853 - RNA, 19 nt, artificial
  Oligomer
ucuuagguucuggguaacc

SEQ ID NO: 19854 - RNA, 19 nt, artificial
  Oligomer
uguccgaaucaaaacuugu

SEQ ID NO: 19855 - RNA, 19 nt, artificial
  Oligomer
auauacuuggaaugaacac

SEQ ID NO: 19856 - RNA, 19 nt, artificial
  Oligomer
uuuccugguccugccaaaa

SEQ ID NO: 19857 - RNA, 19 nt, artificial
  Oligomer
uaacccuugaggguuuaca

SEQ ID NO: 19858 - RNA, 19 nt, artificial
  Oligomer
auacuacuagcucacucag

SEQ ID NO: 19859 - RNA, 19 nt, artificial
  Oligomer
acuacuagcucacucaggc

SEQ ID NO: 19860 - RNA, 19 nt, artificial
  Oligomer
uaucugucucuguaugcaa

SEQ ID NO: 19861 - RNA, 19 nt, artificial
  Oligomer
ucuguaggcuaaguaagcc

SEQ ID NO: 19862 - RNA, 19 nt, artificial
  Oligomer
ucauguauuucuguggauc

SEQ ID NO: 19863 - RNA, 19 nt, artificial
  Oligomer
uccuguuuauucaguucuc

SEQ ID NO: 19864 - RNA, 19 nt, artificial
  Oligomer
ccguuuuccuuacugaccc

SEQ ID NO: 19865 - RNA, 19 nt, artificial
  Oligomer
ucuagagcauaguaaucac

SEQ ID NO: 19866 - RNA, 19 nt, artificial
  Oligomer
acacuauuacaguacauag

SEQ ID NO: 19867 - RNA, 19 nt, artificial
  Oligomer
ucugaagugaaaagaagca

SEQ ID NO: 19868 - RNA, 19 nt, artificial
  Oligomer
auuaaagucuccucuuggc

SEQ ID NO: 19869 - RNA, 19 nt, artificial
  Oligomer
caugguaaugucuuuuugc

SEQ ID NO: 19870 - RNA, 19 nt, artificial
  Oligomer
aaaaagguugcccaggaac

SEQ ID NO: 19871 - RNA, 19 nt, artificial
  Oligomer
uuggaaguacagcuguaau

SEQ ID NO: 19872 - RNA, 19 nt, artificial
  Oligomer
aaaagccgcgucuugucag

SEQ ID NO: 19873 - RNA, 19 nt, artificial
  Oligomer
uaacaucagggaaugaaac

SEQ ID NO: 19874 - RNA, 19 nt, artificial
  Oligomer
uuagcaaaacacucaucuu

SEQ ID NO: 19875 - RNA, 19 nt, artificial
  Oligomer
ucuucuuagguucugggua

SEQ ID NO: 19876 - RNA, 19 nt, artificial
  Oligomer
cuuagguucuggguaaccg

SEQ ID NO: 19877 - RNA, 19 nt, artificial
  Oligomer
cuuugccuaaguauaccuc

SEQ ID NO: 19878 - RNA, 19 nt, artificial
  Oligomer
uugccuaaguauaccucau

SEQ ID NO: 19879 - RNA, 19 nt, artificial
  Oligomer
accucauucagaaccaagu

SEQ ID NO: 19880 - RNA, 19 nt, artificial
  Oligomer
ugccaaaauacuacuagcu

SEQ ID NO: 19881 - RNA, 19 nt, artificial
  Oligomer
aacauuuuuguggcucagg

SEQ ID NO: 19882 - RNA, 19 nt, artificial
  Oligomer
aacucaaauuugcuagccc

SEQ ID NO: 19883 - RNA, 19 nt, artificial
  Oligomer
ucccguaggacaucuguag

SEQ ID NO: 19884 - RNA, 19 nt, artificial
  Oligomer
ugcagcucuuccucucuca

SEQ ID NO: 19885 - RNA, 19 nt, artificial
  Oligomer
uaagccuccuuccauucau

SEQ ID NO: 19886 - RNA, 19 nt, artificial
  Oligomer
cugucuuauguccauuugg

SEQ ID NO: 19887 - RNA, 19 nt, artificial
  Oligomer
guuuauucaguucucucca

SEQ ID NO: 19888 - RNA, 19 nt, artificial
  Oligomer
auaagcuugaaucuucaga

SEQ ID NO: 19889 - RNA, 19 nt, artificial
  Oligomer
ugaggagguaguuguuuag

SEQ ID NO: 19890 - RNA, 19 nt, artificial
  Oligomer
uuuccaggucaugagccau

SEQ ID NO: 19891 - RNA, 19 nt, artificial
  Oligomer
cucugaagugaaaagaagc

SEQ ID NO: 19892 - RNA, 19 nt, artificial
  Oligomer
agcaguaagagaauuaaag

SEQ ID NO: 19893 - RNA, 19 nt, artificial
  Oligomer
acagggaggcuauuccacu

SEQ ID NO: 19894 - RNA, 19 nt, artificial
  Oligomer
uccacuuagagggaguccu

SEQ ID NO: 19895 - RNA, 19 nt, artificial
  Oligomer
uaaugucuuuuugccuucu

SEQ ID NO: 19896 - RNA, 19 nt, artificial
  Oligomer
auccaaggaauguggucug

SEQ ID NO: 19897 - RNA, 19 nt, artificial
  Oligomer
acagaagauggucauauug

SEQ ID NO: 19898 - RNA, 19 nt, artificial
  Oligomer
cagaagauggucauauugc

SEQ ID NO: 19899 - RNA, 19 nt, artificial
  Oligomer
auggaugauacauugauac

SEQ ID NO: 19900 - RNA, 19 nt, artificial
  Oligomer
augauacauugauacaagc

SEQ ID NO: 19901 - RNA, 19 nt, artificial
  Oligomer
acuuggaaugaacacuguc

SEQ ID NO: 19902 - RNA, 19 nt, artificial
  Oligomer
uuccugguccugccaaaau

SEQ ID NO: 19903 - RNA, 19 nt, artificial
  Oligomer
guuuucaaagucauuucuc

SEQ ID NO: 19904 - RNA, 19 nt, artificial
  Oligomer
uagcucacucaggcuuugg

SEQ ID NO: 19905 - RNA, 19 nt, artificial
  Oligomer
aacugcugucugucuuaug

SEQ ID NO: 19906 - RNA, 19 nt, artificial
  Oligomer
acugcugucugucuuaugu

SEQ ID NO: 19907 - RNA, 19 nt, artificial
  Oligomer
acuauccaucuguugcuug

SEQ ID NO: 19908 - RNA, 19 nt, artificial
  Oligomer
agaaacaggguucacaagc

SEQ ID NO: 19909 - RNA, 19 nt, artificial
  Oligomer
uucucuccacuauggcuug

SEQ ID NO: 19910 - RNA, 19 nt, artificial
  Oligomer
agauagaaguggcuccagg

SEQ ID NO: 19911 - RNA, 19 nt, artificial
  Oligomer
ucucugccucuccuaauuu

SEQ ID NO: 19912 - RNA, 19 nt, artificial
  Oligomer
gguaguuguuuagucacag

SEQ ID NO: 19913 - RNA, 19 nt, artificial
  Oligomer
uuccagaaauugagagguc

SEQ ID NO: 19914 - RNA, 19 nt, artificial
  Oligomer
acucaugguaaugucuuuu

SEQ ID NO: 19915 - RNA, 19 nt, artificial
  Oligomer
aaaugaauacuuguauggg

SEQ ID NO: 19916 - RNA, 19 nt, artificial
  Oligomer
cauguaucacuuuugucgc

SEQ ID NO: 19917 - RNA, 19 nt, artificial
  Oligomer
auuguguugguuccacauu

SEQ ID NO: 19918 - RNA, 19 nt, artificial
  Oligomer
acuguuggaaguacagcug

SEQ ID NO: 19919 - RNA, 19 nt, artificial
  Oligomer
agaaaggugaagauaaaag

SEQ ID NO: 19920 - RNA, 19 nt, artificial
  Oligomer
aaggugaagauaaaagccg

SEQ ID NO: 19921 - RNA, 19 nt, artificial
  Oligomer
cucgauaguugaauucuug

SEQ ID NO: 19922 - RNA, 19 nt, artificial
  Oligomer
ucuggguaaccguguauag

SEQ ID NO: 19923 - RNA, 19 nt, artificial
  Oligomer
uuuuccugguccugccaaa

SEQ ID NO: 19924 - RNA, 19 nt, artificial
  Oligomer
cagucuauaacccuugagg

SEQ ID NO: 19925 - RNA, 19 nt, artificial
  Oligomer
acauuuuuguggcucaggc

SEQ ID NO: 19926 - RNA, 19 nt, artificial
  Oligomer
guucucuuuauguuugggc

SEQ ID NO: 19927 - RNA, 19 nt, artificial
  Oligomer
aucccuuagugaucccacc

SEQ ID NO: 19928 - RNA, 19 nt, artificial
  Oligomer
acucaaauuugcuagcccu

SEQ ID NO: 19929 - RNA, 19 nt, artificial
  Oligomer
aucuguaggcuaaguaagc

SEQ ID NO: 19930 - RNA, 19 nt, artificial
  Oligomer
ugucuuggucuuccuaauu

SEQ ID NO: 19931 - RNA, 19 nt, artificial
  Oligomer
ugucugucuuauguccauu

SEQ ID NO: 19932 - RNA, 19 nt, artificial
  Oligomer
cuuguuucaagacuuguug

SEQ ID NO: 19933 - RNA, 19 nt, artificial
  Oligomer
cucacuagucaguucuuca

SEQ ID NO: 19934 - RNA, 19 nt, artificial
  Oligomer
ucuggcauuuuccuguuua

SEQ ID NO: 19935 - RNA, 19 nt, artificial
  Oligomer
uggcuccagguucuaucuc

SEQ ID NO: 19936 - RNA, 19 nt, artificial
  Oligomer
ucugcagucucauugaaau

SEQ ID NO: 19937 - RNA, 19 nt, artificial
  Oligomer
guuuuccuuacugacccug

SEQ ID NO: 19938 - RNA, 19 nt, artificial
  Oligomer
aauucugggcagauaaaag

SEQ ID NO: 19939 - RNA, 19 nt, artificial
  Oligomer
ugagccauuaagcugggcu

SEQ ID NO: 19940 - RNA, 19 nt, artificial
  Oligomer
ugucuuuuugccuucugga

SEQ ID NO: 19941 - RNA, 19 nt, artificial
  Oligomer
augggcuuuacucuuuaau

SEQ ID NO: 19942 - RNA, 19 nt, artificial
  Oligomer
aacauguaucacuuuuguc

SEQ ID NO: 19943 - RNA, 19 nt, artificial
  Oligomer
uguuacucagucccauagu

SEQ ID NO: 19944 - RNA, 19 nt, artificial
  Oligomer
acucucuucccucuccauu

SEQ ID NO: 19945 - RNA, 19 nt, artificial
  Oligomer
aacuguuggaaguacagcu

SEQ ID NO: 19946 - RNA, 19 nt, artificial
  Oligomer
ugucaguuuccagaauaca

SEQ ID NO: 19947 - RNA, 19 nt, artificial
  Oligomer
aauugguacuauuucaggu

SEQ ID NO: 19948 - RNA, 19 nt, artificial
  Oligomer
cugaaguuagcaagcacug

SEQ ID NO: 19949 - RNA, 19 nt, artificial
  Oligomer
uggaugcgaaucauuccug

SEQ ID NO: 19950 - RNA, 19 nt, artificial
  Oligomer
aagauugugaagucucagg

SEQ ID NO: 19951 - RNA, 19 nt, artificial
  Oligomer
cuaaguauaccucauucag

SEQ ID NO: 19952 - RNA, 19 nt, artificial
  Oligomer
ugcugcacaaaacauguua

SEQ ID NO: 19953 - RNA, 19 nt, artificial
  Oligomer
gcuaggagucuaaucaagg

SEQ ID NO: 19954 - RNA, 19 nt, artificial
  Oligomer
ucccaguauaucugucucu

SEQ ID NO: 19955 - RNA, 19 nt, artificial
  Oligomer
aaaaacaaucauccaacuc

SEQ ID NO: 19956 - RNA, 19 nt, artificial
  Oligomer
aucauccaacucaaauuug

SEQ ID NO: 19957 - RNA, 19 nt, artificial
  Oligomer
ucacucaggcuuugguuuu

SEQ ID NO: 19958 - RNA, 19 nt, artificial
  Oligomer
uucccguaggacaucugua

SEQ ID NO: 19959 - RNA, 19 nt, artificial
  Oligomer
uuucauguauuucugugga

SEQ ID NO: 19960 - RNA, 19 nt, artificial
  Oligomer
uggcauuuuccuguuuauu

SEQ ID NO: 19961 - RNA, 19 nt, artificial
  Oligomer
aaauuuagguuggucugcu

SEQ ID NO: 19962 - RNA, 19 nt, artificial
  Oligomer
uuuccagaaauugagaggu

SEQ ID NO: 19963 - RNA, 19 nt, artificial
  Oligomer
uccagaaauugagaggucu

SEQ ID NO: 19964 - RNA, 19 nt, artificial
  Oligomer
uauuacucaugguaauguc

SEQ ID NO: 19965 - RNA, 19 nt, artificial
  Oligomer
aagaaaucaaaaagguugc

SEQ ID NO: 19966 - RNA, 19 nt, artificial
  Oligomer
ucaaaaagguugcccagga

SEQ ID NO: 19967 - RNA, 19 nt, artificial
  Oligomer
ucuguucacucucuucccu

SEQ ID NO: 19968 - RNA, 19 nt, artificial
  Oligomer
cuguaauccaaggaaugug

SEQ ID NO: 19969 - RNA, 19 nt, artificial
  Oligomer
ucuauagagaaaggugaag

SEQ ID NO: 19970 - RNA, 19 nt, artificial
  Oligomer
cauauugcucguaacauca

SEQ ID NO: 19971 - RNA, 19 nt, artificial
  Oligomer
guucugugacauuaucuug

SEQ ID NO: 19972 - RNA, 19 nt, artificial
  Oligomer
uauuucagguugacugaag

SEQ ID NO: 19973 - RNA, 19 nt, artificial
  Oligomer
cauuccugugggcuuuuug

SEQ ID NO: 19974 - RNA, 19 nt, artificial
  Oligomer
acauugauacaagcccuug

SEQ ID NO: 19975 - RNA, 19 nt, artificial
  Oligomer
aaccaaguuuuccuggucc

SEQ ID NO: 19976 - RNA, 19 nt, artificial
  Oligomer
cauuucucccaguauaucu

SEQ ID NO: 19977 - RNA, 19 nt, artificial
  Oligomer
uuucucccaguauaucugu

SEQ ID NO: 19978 - RNA, 19 nt, artificial
  Oligomer
uuccucugguugccuugag

SEQ ID NO: 19979 - RNA, 19 nt, artificial
  Oligomer
gucuuggucuuccuaauuc

SEQ ID NO: 19980 - RNA, 19 nt, artificial
  Oligomer
uuaucaaggugauggcucu

SEQ ID NO: 19981 - RNA, 19 nt, artificial
  Oligomer
uaucaaggugauggcucuc

SEQ ID NO: 19982 - RNA, 19 nt, artificial
  Oligomer
cuuuugguucuuucacagc

SEQ ID NO: 19983 - RNA, 19 nt, artificial
  Oligomer
ugcaaauuggcauggcagg

SEQ ID NO: 19984 - RNA, 19 nt, artificial
  Oligomer
aagagaaacaggguucaca

SEQ ID NO: 19985 - RNA, 19 nt, artificial
  Oligomer
acaggguucacaagcucug

SEQ ID NO: 19986 - RNA, 19 nt, artificial
  Oligomer
uccacuauggcuuguuggg

SEQ ID NO: 19987 - RNA, 19 nt, artificial
  Oligomer
acauaagucccacccagac

SEQ ID NO: 19988 - RNA, 19 nt, artificial
  Oligomer
gagguaguuguuuagucac

SEQ ID NO: 19989 - RNA, 19 nt, artificial
  Oligomer
uggcccauaagugugcucu

SEQ ID NO: 19990 - RNA, 19 nt, artificial
  Oligomer
agugaaaagaagcaguaag

SEQ ID NO: 19991 - RNA, 19 nt, artificial
  Oligomer
ugguaaugucuuuuugccu

SEQ ID NO: 19992 - RNA, 19 nt, artificial
  Oligomer
uguaugggcuuuacucuuu

SEQ ID NO: 19993 - RNA, 19 nt, artificial
  Oligomer
uccauuguguugguuccac

SEQ ID NO: 19994 - RNA, 21 nt, artificial
  Oligomer
caaugagcagaccaaccuaaa

SEQ ID NO: 19995 - RNA, 21 nt, artificial
  Oligomer
gaacagaccaagaaaagagaa

SEQ ID NO: 19996 - RNA, 21 nt, artificial
  Oligomer
ggaagagagugaacagaccaa

SEQ ID NO: 19997 - RNA, 21 nt, artificial
  Oligomer
cugggagaaaugacuuugaaa

SEQ ID NO: 19998 - RNA, 21 nt, artificial
  Oligomer
gcucaugaccuggaaauaaaa

SEQ ID NO: 19999 - RNA, 21 nt, artificial
  Oligomer
gugugaugguuuucugucuaa

SEQ ID NO: 20000 - RNA, 21 nt, artificial
  Oligomer
gaaugagguauacuuaggcaa

SEQ ID NO: 20001 - RNA, 21 nt, artificial
  Oligomer
aacagaccaagaaaagagaaa

SEQ ID NO: 20002 - RNA, 21 nt, artificial
  Oligomer
cggccucgcaacucuuauaaa

SEQ ID NO: 20003 - RNA, 21 nt, artificial
  Oligomer
agaagaugaguguuuugcuaa

SEQ ID NO: 20004 - RNA, 21 nt, artificial
  Oligomer
gagagugaacagaccaagaaa

SEQ ID NO: 20005 - RNA, 21 nt, artificial
  Oligomer
ggaagcugugaaagaaccaaa

SEQ ID NO: 20006 - RNA, 21 nt, artificial
  Oligomer
guaugaugguguuaugcagaa

SEQ ID NO: 20007 - RNA, 21 nt, artificial
  Oligomer
gggugggacuuauguauuuau

SEQ ID NO: 20008 - RNA, 21 nt, artificial
  Oligomer
ccaucuucuguauucuggaaa

SEQ ID NO: 20009 - RNA, 21 nt, artificial
  Oligomer
caguguucauuccaaguauau

SEQ ID NO: 20010 - RNA, 21 nt, artificial
  Oligomer
cagucucugcccaaacauaaa

SEQ ID NO: 20011 - RNA, 21 nt, artificial
  Oligomer
agaggaagagcugcaacggaa

SEQ ID NO: 20012 - RNA, 21 nt, artificial
  Oligomer
gguguuaugcagaaaucucaa

SEQ ID NO: 20013 - RNA, 21 nt, artificial
  Oligomer
gcucuaaggugggaucacuaa

SEQ ID NO: 20014 - RNA, 21 nt, artificial
  Oligomer
gguauacuuaggcaaagagaa

SEQ ID NO: 20015 - RNA, 21 nt, artificial
  Oligomer
ccaggaaaacuugguucugaa

SEQ ID NO: 20016 - RNA, 21 nt, artificial
  Oligomer
ggcucuaaggugggaucacua

SEQ ID NO: 20017 - RNA, 21 nt, artificial
  Oligomer
gaggaagagcugcaacggaau

SEQ ID NO: 20018 - RNA, 21 nt, artificial
  Oligomer
gagugaacagaccaagaaaag

SEQ ID NO: 20019 - RNA, 21 nt, artificial
  Oligomer
agaugaguguuuugcuaagaa

SEQ ID NO: 20020 - RNA, 21 nt, artificial
  Oligomer
gaagcugugaaagaaccaaaa

SEQ ID NO: 20021 - RNA, 21 nt, artificial
  Oligomer
cugucagggucaguaaggaaa

SEQ ID NO: 20022 - RNA, 21 nt, artificial
  Oligomer
ugaacagaccaagaaaagaga

SEQ ID NO: 20023 - RNA, 21 nt, artificial
  Oligomer
gcaacucuuauaaauguggaa

SEQ ID NO: 20024 - RNA, 21 nt, artificial
  Oligomer
ggauuacagcuguacuuccaa

SEQ ID NO: 20025 - RNA, 21 nt, artificial
  Oligomer
cgaguaugaugguguuaugca

SEQ ID NO: 20026 - RNA, 21 nt, artificial
  Oligomer
ggaugaauggaaggaggcuua

SEQ ID NO: 20027 - RNA, 21 nt, artificial
  Oligomer
cagaccaagaaaagagaaaaa

SEQ ID NO: 20028 - RNA, 21 nt, artificial
  Oligomer
gugugauuacuaugcucuaga

SEQ ID NO: 20029 - RNA, 21 nt, artificial
  Oligomer
gaaaaugccagagcuugugaa

SEQ ID NO: 20030 - RNA, 21 nt, artificial
  Oligomer
gccauaguggagagaacugaa

SEQ ID NO: 20031 - RNA, 21 nt, artificial
  Oligomer
gacuaaacaacuaccuccuca

SEQ ID NO: 20032 - RNA, 21 nt, artificial
  Oligomer
gaaugauucgcauccaccaga

SEQ ID NO: 20033 - RNA, 21 nt, artificial
  Oligomer
caauguaucauccaucacaaa

SEQ ID NO: 20034 - RNA, 21 nt, artificial
  Oligomer
caacggaauuaggaagaccaa

SEQ ID NO: 20035 - RNA, 21 nt, artificial
  Oligomer
ggcucaugaccuggaaauaaa

SEQ ID NO: 20036 - RNA, 21 nt, artificial
  Oligomer
ggguuauagacugccaugcua

SEQ ID NO: 20037 - RNA, 21 nt, artificial
  Oligomer
ccuuuguaaguuccugggcaa

SEQ ID NO: 20038 - RNA, 21 nt, artificial
  Oligomer
agugaacagaccaagaaaaga

SEQ ID NO: 20039 - RNA, 21 nt, artificial
  Oligomer
gcaauaugaccaucuucugua

SEQ ID NO: 20040 - RNA, 21 nt, artificial
  Oligomer
gaguguuuugcuaagaaccaa

SEQ ID NO: 20041 - RNA, 21 nt, artificial
  Oligomer
gcauagggcuagcaaauuuga

SEQ ID NO: 20042 - RNA, 21 nt, artificial
  Oligomer
gagaacugaauaaacaggaaa

SEQ ID NO: 20043 - RNA, 21 nt, artificial
  Oligomer
uguguaccugugacuaaacaa

SEQ ID NO: 20044 - RNA, 21 nt, artificial
  Oligomer
gaauuuuguguguaccuguga

SEQ ID NO: 20045 - RNA, 21 nt, artificial
  Oligomer
ccaaguauaugggccgcacaa

SEQ ID NO: 20046 - RNA, 21 nt, artificial
  Oligomer
guauacuuaggcaaagagaaa

SEQ ID NO: 20047 - RNA, 21 nt, artificial
  Oligomer
cagaggaaacuugcauacaga

SEQ ID NO: 20048 - RNA, 21 nt, artificial
  Oligomer
cugugaaagaaccaaaagaga

SEQ ID NO: 20049 - RNA, 21 nt, artificial
  Oligomer
ggaaaaugccagagcuuguga

SEQ ID NO: 20050 - RNA, 21 nt, artificial
  Oligomer
cauaguggagagaacugaaua

SEQ ID NO: 20051 - RNA, 21 nt, artificial
  Oligomer
agagugaacagaccaagaaaa

SEQ ID NO: 20052 - RNA, 21 nt, artificial
  Oligomer
acacgguuacccagaaccuaa

SEQ ID NO: 20053 - RNA, 21 nt, artificial
  Oligomer
gagcugcaacggaauuaggaa

SEQ ID NO: 20054 - RNA, 21 nt, artificial
  Oligomer
ggaagagcugcaacggaauua

SEQ ID NO: 20055 - RNA, 21 nt, artificial
  Oligomer
ccaauuugcaaacucucaaaa

SEQ ID NO: 20056 - RNA, 21 nt, artificial
  Oligomer
gccaauuugcaaacucucaaa

SEQ ID NO: 20057 - RNA, 21 nt, artificial
  Oligomer
gaaacaagcaacagauggaua

SEQ ID NO: 20058 - RNA, 21 nt, artificial
  Oligomer
ccauaguggagagaacugaau

SEQ ID NO: 20059 - RNA, 21 nt, artificial
  Oligomer
gugggacuuauguauuuauga

SEQ ID NO: 20060 - RNA, 21 nt, artificial
  Oligomer
aguggaauagccucccuguaa

SEQ ID NO: 20061 - RNA, 21 nt, artificial
  Oligomer
gaguaaagcccauacaaguau

SEQ ID NO: 20062 - RNA, 21 nt, artificial
  Oligomer
cucuuauaaauguggaaccaa

SEQ ID NO: 20063 - RNA, 21 nt, artificial
  Oligomer
cuguauucuggaaacugacaa

SEQ ID NO: 20064 - RNA, 21 nt, artificial
  Oligomer
cuaacuucagucaaccugaaa

SEQ ID NO: 20065 - RNA, 21 nt, artificial
  Oligomer
gcacaaguuuugauucggaca

SEQ ID NO: 20066 - RNA, 21 nt, artificial
  Oligomer
ugaagcccagcguguuuuuaa

SEQ ID NO: 20067 - RNA, 21 nt, artificial
  Oligomer
agagagugaacagaccaagaa

SEQ ID NO: 20068 - RNA, 21 nt, artificial
  Oligomer
gcacuaugggacugaguaaca

SEQ ID NO: 20069 - RNA, 21 nt, artificial
  Oligomer
ugcuaagaaccaagaauucaa

SEQ ID NO: 20070 - RNA, 21 nt, artificial
  Oligomer
caaccagaggaaacuugcaua

SEQ ID NO: 20071 - RNA, 21 nt, artificial
  Oligomer
gauuguuuuugcucaaggcaa

SEQ ID NO: 20072 - RNA, 21 nt, artificial
  Oligomer
ggaauuaggaagaccaagaca

SEQ ID NO: 20073 - RNA, 21 nt, artificial
  Oligomer
agagcugcaacggaauuagga

SEQ ID NO: 20074 - RNA, 21 nt, artificial
  Oligomer
cuaggguacaggcaacaauga

SEQ ID NO: 20075 - RNA, 21 nt, artificial
  Oligomer
ccuuuuugauuucuuccagaa

SEQ ID NO: 20076 - RNA, 21 nt, artificial
  Oligomer
agggcuuguaucaauguauca

SEQ ID NO: 20077 - RNA, 21 nt, artificial
  Oligomer
gaggaaacuugcauacagaga

SEQ ID NO: 20078 - RNA, 21 nt, artificial
  Oligomer
gggagagccaucaccuugaua

SEQ ID NO: 20079 - RNA, 21 nt, artificial
  Oligomer
gaacccuguuucucuugaaga

SEQ ID NO: 20080 - RNA, 21 nt, artificial
  Oligomer
aagcccagcguguuuuuaaaa

SEQ ID NO: 20081 - RNA, 21 nt, artificial
  Oligomer
gaagcccagcguguuuuuaaa

SEQ ID NO: 20082 - RNA, 21 nt, artificial
  Oligomer
agauggauagucuguccaaau

SEQ ID NO: 20083 - RNA, 21 nt, artificial
  Oligomer
ugucagggucaguaaggaaaa

SEQ ID NO: 20084 - RNA, 21 nt, artificial
  Oligomer
ugauuacuaugcucuagagaa

SEQ ID NO: 20085 - RNA, 21 nt, artificial
  Oligomer
cgaagacaucuucaugcgaca

SEQ ID NO: 20086 - RNA, 21 nt, artificial
  Oligomer
gauucgcauccaccagaugaa

SEQ ID NO: 20087 - RNA, 21 nt, artificial
  Oligomer
caagcuuguccauguaauauu

SEQ ID NO: 20088 - RNA, 21 nt, artificial
  Oligomer
ggcuagcaaauuugaguugga

SEQ ID NO: 20089 - RNA, 21 nt, artificial
  Oligomer
gggaagcugugaaagaaccaa

SEQ ID NO: 20090 - RNA, 21 nt, artificial
  Oligomer
cauagagaucuauguacugua

SEQ ID NO: 20091 - RNA, 21 nt, artificial
  Oligomer
caggacucccucuaaguggaa

SEQ ID NO: 20092 - RNA, 21 nt, artificial
  Oligomer
cuucaugcgacaaaagugaua

SEQ ID NO: 20093 - RNA, 21 nt, artificial
  Oligomer
aagacaucuucaugcgacaaa

SEQ ID NO: 20094 - RNA, 21 nt, artificial
  Oligomer
gggaagagagugaacagacca

SEQ ID NO: 20095 - RNA, 21 nt, artificial
  Oligomer
cuuauaaauguggaaccaaca

SEQ ID NO: 20096 - RNA, 21 nt, artificial
  Oligomer
ucuauggaaauggaagaagaa

SEQ ID NO: 20097 - RNA, 21 nt, artificial
  Oligomer
cagcuguacuuccaacaguua

SEQ ID NO: 20098 - RNA, 21 nt, artificial
  Oligomer
ugguguuaugcagaaaucuca

SEQ ID NO: 20099 - RNA, 21 nt, artificial
  Oligomer
caagaauucaacuaucgagua

SEQ ID NO: 20100 - RNA, 21 nt, artificial
  Oligomer
cgguuacccagaaccuaagaa

SEQ ID NO: 20101 - RNA, 21 nt, artificial
  Oligomer
cuuguaucaauguaucaucca

SEQ ID NO: 20102 - RNA, 21 nt, artificial
  Oligomer
caagggcuuguaucaauguau

SEQ ID NO: 20103 - RNA, 21 nt, artificial
  Oligomer
caggaaaacuugguucugaau

SEQ ID NO: 20104 - RNA, 21 nt, artificial
  Oligomer
uauuuuggcaggaccaggaaa

SEQ ID NO: 20105 - RNA, 21 nt, artificial
  Oligomer
guuauagacugccaugcuaga

SEQ ID NO: 20106 - RNA, 21 nt, artificial
  Oligomer
gguuauagacugccaugcuag

SEQ ID NO: 20107 - RNA, 21 nt, artificial
  Oligomer
gcagucucugcccaaacauaa

SEQ ID NO: 20108 - RNA, 21 nt, artificial
  Oligomer
ggcagucucugcccaaacaua

SEQ ID NO: 20109 - RNA, 21 nt, artificial
  Oligomer
ggagagccaucaccuugauaa

SEQ ID NO: 20110 - RNA, 21 nt, artificial
  Oligomer
agcugugaaagaaccaaaaga

SEQ ID NO: 20111 - RNA, 21 nt, artificial
  Oligomer
cuaucugggcuguugcuaaua

SEQ ID NO: 20112 - RNA, 21 nt, artificial
  Oligomer
gauuacuaugcucuagagaaa

SEQ ID NO: 20113 - RNA, 21 nt, artificial
  Oligomer
cuauguacuguaauaguguga

SEQ ID NO: 20114 - RNA, 21 nt, artificial
  Oligomer
cgacaaaagugauacauguuu

SEQ ID NO: 20115 - RNA, 21 nt, artificial
  Oligomer
gcgacaaaagugauacauguu

SEQ ID NO: 20116 - RNA, 21 nt, artificial
  Oligomer
agguauacuuaggcaaagaga

SEQ ID NO: 20117 - RNA, 21 nt, artificial
  Oligomer
gguucugaaugagguauacuu

SEQ ID NO: 20118 - RNA, 21 nt, artificial
  Oligomer
cuugguucugaaugagguaua

SEQ ID NO: 20119 - RNA, 21 nt, artificial
  Oligomer
guauuuuggcaggaccaggaa

SEQ ID NO: 20120 - RNA, 21 nt, artificial
  Oligomer
ugggagaaaugacuuugaaaa

SEQ ID NO: 20121 - RNA, 21 nt, artificial
  Oligomer
agaggaaacuugcauacagag

SEQ ID NO: 20122 - RNA, 21 nt, artificial
  Oligomer
ccuacagauguccuacgggaa

SEQ ID NO: 20123 - RNA, 21 nt, artificial
  Oligomer
uugcaaacucucaaaaccaaa

SEQ ID NO: 20124 - RNA, 21 nt, artificial
  Oligomer
ccaucaacaagucuugaaaca

SEQ ID NO: 20125 - RNA, 21 nt, artificial
  Oligomer
gagagaacugaauaaacagga

SEQ ID NO: 20126 - RNA, 21 nt, artificial
  Oligomer
gaggcagagauagaaccugga

SEQ ID NO: 20127 - RNA, 21 nt, artificial
  Oligomer
ggaaauuaggagaggcagaga

SEQ ID NO: 20128 - RNA, 21 nt, artificial
  Oligomer
acaaugagcagaccaaccuaa

SEQ ID NO: 20129 - RNA, 21 nt, artificial
  Oligomer
guaccugugacuaaacaacua

SEQ ID NO: 20130 - RNA, 21 nt, artificial
  Oligomer
gcugcuccucugaagauucaa

SEQ ID NO: 20131 - RNA, 21 nt, artificial
  Oligomer
ccagaaggcaaaaagacauua

SEQ ID NO: 20132 - RNA, 21 nt, artificial
  Oligomer
uaauggcucaugaccuggaaa

SEQ ID NO: 20133 - RNA, 21 nt, artificial
  Oligomer
ugauuucuuccagaaggcaaa

SEQ ID NO: 20134 - RNA, 21 nt, artificial
  Oligomer
cugacaagacgcggcuuuuau

SEQ ID NO: 20135 - RNA, 21 nt, artificial
  Oligomer
aggacaagggcuuguaucaau

SEQ ID NO: 20136 - RNA, 21 nt, artificial
  Oligomer
caaucuucagaucaaggacaa

SEQ ID NO: 20137 - RNA, 21 nt, artificial
  Oligomer
gcugcaacggaauuaggaaga

SEQ ID NO: 20138 - RNA, 21 nt, artificial
  Oligomer
ggacauaagacagacagcagu

SEQ ID NO: 20139 - RNA, 21 nt, artificial
  Oligomer
caaauggacauaagacagaca

SEQ ID NO: 20140 - RNA, 21 nt, artificial
  Oligomer
caucaacaagucuugaaacaa

SEQ ID NO: 20141 - RNA, 21 nt, artificial
  Oligomer
ccugccaugccaauuugcaaa

SEQ ID NO: 20142 - RNA, 21 nt, artificial
  Oligomer
guguguaccugugacuaaaca

SEQ ID NO: 20143 - RNA, 21 nt, artificial
  Oligomer
cuuccagaaggcaaaaagaca

SEQ ID NO: 20144 - RNA, 21 nt, artificial
  Oligomer
acagaccaagaaaagagaaaa

SEQ ID NO: 20145 - RNA, 21 nt, artificial
  Oligomer
gagacagauauacugggagaa

SEQ ID NO: 20146 - RNA, 21 nt, artificial
  Oligomer
ucuugauccacagaaauacau

SEQ ID NO: 20147 - RNA, 21 nt, artificial
  Oligomer
aaauuaggagaggcagagaua

SEQ ID NO: 20148 - RNA, 21 nt, artificial
  Oligomer
caagcuuauuucaaugagacu

SEQ ID NO: 20149 - RNA, 21 nt, artificial
  Oligomer
ccagaucagauucuucucuua

SEQ ID NO: 20150 - RNA, 21 nt, artificial
  Oligomer
uaaagaguaaagcccauacaa

SEQ ID NO: 20151 - RNA, 21 nt, artificial
  Oligomer
ggagagggaagagagugaaca

SEQ ID NO: 20152 - RNA, 21 nt, artificial
  Oligomer
uguuuugcuaagaaccaagaa

SEQ ID NO: 20153 - RNA, 21 nt, artificial
  Oligomer
caaccugaaauaguaccaauu

SEQ ID NO: 20154 - RNA, 21 nt, artificial
  Oligomer
acuucacaaucuucagaucaa

SEQ ID NO: 20155 - RNA, 21 nt, artificial
  Oligomer
uagacaagcuuguccauguaa

SEQ ID NO: 20156 - RNA, 21 nt, artificial
  Oligomer
gauccacagaaauacaugaaa

SEQ ID NO: 20157 - RNA, 21 nt, artificial
  Oligomer
ugugaaagaaccaaaagagau

SEQ ID NO: 20158 - RNA, 21 nt, artificial
  Oligomer
caggcaacaaugagcagacca

SEQ ID NO: 20159 - RNA, 21 nt, artificial
  Oligomer
cugccuuuuaucugcccagaa

SEQ ID NO: 20160 - RNA, 21 nt, artificial
  Oligomer
uaugggccaagcccagcuuaa

SEQ ID NO: 20161 - RNA, 21 nt, artificial
  Oligomer
gaggagacuuuaauucucuua

SEQ ID NO: 20162 - RNA, 21 nt, artificial
  Oligomer
guguuuugcuaagaaccaaga

SEQ ID NO: 20163 - RNA, 21 nt, artificial
  Oligomer
gagaaauuugacaguguucau

SEQ ID NO: 20164 - RNA, 21 nt, artificial
  Oligomer
uaaggugggaucacuaaggga

SEQ ID NO: 20165 - RNA, 21 nt, artificial
  Oligomer
ggaagaccaagacacagauca

SEQ ID NO: 20166 - RNA, 21 nt, artificial
  Oligomer
ugggaugucaucuuccuggaa

SEQ ID NO: 20167 - RNA, 21 nt, artificial
  Oligomer
gcguguuuuuaaaaguucgaa

SEQ ID NO: 20168 - RNA, 21 nt, artificial
  Oligomer
acaguguucauuccaaguaua

SEQ ID NO: 20169 - RNA, 21 nt, artificial
  Oligomer
cuuaggcaaagagaaauuuga

SEQ ID NO: 20170 - RNA, 21 nt, artificial
  Oligomer
guuucuaacauguuuugugca

SEQ ID NO: 20171 - RNA, 21 nt, artificial
  Oligomer
cuugcauacagagacagauau

SEQ ID NO: 20172 - RNA, 21 nt, artificial
  Oligomer
gcucaaggcaaccagaggaaa

SEQ ID NO: 20173 - RNA, 21 nt, artificial
  Oligomer
ugcucaaggcaaccagaggaa

SEQ ID NO: 20174 - RNA, 21 nt, artificial
  Oligomer
cugagagaggaagagcugcaa

SEQ ID NO: 20175 - RNA, 21 nt, artificial
  Oligomer
caacaagucuugaaacaagca

SEQ ID NO: 20176 - RNA, 21 nt, artificial
  Oligomer
gaaccaaaagagaucacaaua

SEQ ID NO: 20177 - RNA, 21 nt, artificial
  Oligomer
ugaauaaacaggaaaaugcca

SEQ ID NO: 20178 - RNA, 21 nt, artificial
  Oligomer
gugauuacuaugcucuagaga

SEQ ID NO: 20179 - RNA, 21 nt, artificial
  Oligomer
ccucugaagauucaagcuuau

SEQ ID NO: 20180 - RNA, 21 nt, artificial
  Oligomer
acugcuucuuuucacuucaga

SEQ ID NO: 20181 - RNA, 21 nt, artificial
  Oligomer
aagagagugaacagaccaaga

SEQ ID NO: 20182 - RNA, 21 nt, artificial
  Oligomer
ucacaaaaagcccacaggaau

SEQ ID NO: 20183 - RNA, 21 nt, artificial
  Oligomer
auuugacaguguucauuccaa

SEQ ID NO: 20184 - RNA, 21 nt, artificial
  Oligomer
ccugagugagcuaguaguauu

SEQ ID NO: 20185 - RNA, 21 nt, artificial
  Oligomer
acugggagaaaugacuuugaa

SEQ ID NO: 20186 - RNA, 21 nt, artificial
  Oligomer
ggguuuuggugauacccaagu

SEQ ID NO: 20187 - RNA, 21 nt, artificial
  Oligomer
cugggcuguugcuaauauuga

SEQ ID NO: 20188 - RNA, 21 nt, artificial
  Oligomer
gaaauuaggagaggcagagau

SEQ ID NO: 20189 - RNA, 21 nt, artificial
  Oligomer
gggucaguaaggaaaacggug

SEQ ID NO: 20190 - RNA, 21 nt, artificial
  Oligomer
agaggagacuuuaauucucuu

SEQ ID NO: 20191 - RNA, 21 nt, artificial
  Oligomer
caaaaagacauuaccaugagu

SEQ ID NO: 20192 - RNA, 21 nt, artificial
  Oligomer
guggaaccaacacaauggaga

SEQ ID NO: 20193 - RNA, 21 nt, artificial
  Oligomer
cagaccacauuccuuggauua

SEQ ID NO: 20194 - RNA, 21 nt, artificial
  Oligomer
cccugauguuacgagcaauau

SEQ ID NO: 20195 - RNA, 21 nt, artificial
  Oligomer
gcccacaggaaugauucgcau

SEQ ID NO: 20196 - RNA, 21 nt, artificial
  Oligomer
guauaugggccgcacaaguuu

SEQ ID NO: 20197 - RNA, 21 nt, artificial
  Oligomer
ccugccuugauuagacuccua

SEQ ID NO: 20198 - RNA, 21 nt, artificial
  Oligomer
uggaugauuguuuuugcucaa

SEQ ID NO: 20199 - RNA, 21 nt, artificial
  Oligomer
acggaauuaggaagaccaaga

SEQ ID NO: 20200 - RNA, 21 nt, artificial
  Oligomer
guggagagaacugaauaaaca

SEQ ID NO: 20201 - RNA, 21 nt, artificial
  Oligomer
aggcaacaaugagcagaccaa

SEQ ID NO: 20202 - RNA, 21 nt, artificial
  Oligomer
gccuuuuaucugcccagaauu

SEQ ID NO: 20203 - RNA, 21 nt, artificial
  Oligomer
gaugaagcccagcguguuuuu

SEQ ID NO: 20204 - RNA, 21 nt, artificial
  Oligomer
auaccugaaagaucugaugaa

SEQ ID NO: 20205 - RNA, 21 nt, artificial
  Oligomer
ugagguauacuuaggcaaaga

SEQ ID NO: 20206 - RNA, 21 nt, artificial
  Oligomer
ggaaaacuugguucugaauga

SEQ ID NO: 20207 - RNA, 21 nt, artificial
  Oligomer
cacccaacaagccauagugga

SEQ ID NO: 20208 - RNA, 21 nt, artificial
  Oligomer
ggcuguugcuaauauugagga

SEQ ID NO: 20209 - RNA, 21 nt, artificial
  Oligomer
uuaggagaggcagagauagaa

SEQ ID NO: 20210 - RNA, 21 nt, artificial
  Oligomer
ggaccaauaccuccuccagau

SEQ ID NO: 20211 - RNA, 21 nt, artificial
  Oligomer
agauaaugucacagaacugua

SEQ ID NO: 20212 - RNA, 21 nt, artificial
  Oligomer
gcagaaaucucaagauaaugu

SEQ ID NO: 20213 - RNA, 21 nt, artificial
  Oligomer
aaccaagaauucaacuaucga

SEQ ID NO: 20214 - RNA, 21 nt, artificial
  Oligomer
caaggacaagggcuuguauca

SEQ ID NO: 20215 - RNA, 21 nt, artificial
  Oligomer
gcuaguaguauuuuggcagga

SEQ ID NO: 20216 - RNA, 21 nt, artificial
  Oligomer
ggaugauuguuuuugcucaag

SEQ ID NO: 20217 - RNA, 21 nt, artificial
  Oligomer
acagauggauagucuguccaa

SEQ ID NO: 20218 - RNA, 21 nt, artificial
  Oligomer
agagaacugaauaaacaggaa

SEQ ID NO: 20219 - RNA, 21 nt, artificial
  Oligomer
cugggugggacuuauguauuu

SEQ ID NO: 20220 - RNA, 21 nt, artificial
  Oligomer
cagaucagauucuucucuuaa

SEQ ID NO: 20221 - RNA, 21 nt, artificial
  Oligomer
ccaagaggagacuuuaauucu

SEQ ID NO: 20222 - RNA, 21 nt, artificial
  Oligomer
uaugccaagaggagacuuuaa

SEQ ID NO: 20223 - RNA, 21 nt, artificial
  Oligomer
gaguaacauucucuuugugau

SEQ ID NO: 20224 - RNA, 21 nt, artificial
  Oligomer
ggccucgcaacucuuauaaau

SEQ ID NO: 20225 - RNA, 21 nt, artificial
  Oligomer
gcggcuuuuaucuucaccuuu

SEQ ID NO: 20226 - RNA, 21 nt, artificial
  Oligomer
aguaugaugguguuaugcaga

SEQ ID NO: 20227 - RNA, 21 nt, artificial
  Oligomer
cacgguuacccagaaccuaag

SEQ ID NO: 20228 - RNA, 21 nt, artificial
  Oligomer
acauaaauuugaccugcucau

SEQ ID NO: 20229 - RNA, 21 nt, artificial
  Oligomer
acaggaaugauucgcauccac

SEQ ID NO: 20230 - RNA, 21 nt, artificial
  Oligomer
aucacaaaaagcccacaggaa

SEQ ID NO: 20231 - RNA, 21 nt, artificial
  Oligomer
gccacaaaaauguuccuuuau

SEQ ID NO: 20232 - RNA, 21 nt, artificial
  Oligomer
gggagccugagccacaaaaau

SEQ ID NO: 20233 - RNA, 21 nt, artificial
  Oligomer
gggcuuacuuagccuacagau

SEQ ID NO: 20234 - RNA, 21 nt, artificial
  Oligomer
ucuugaagaacugacuaguga

SEQ ID NO: 20235 - RNA, 21 nt, artificial
  Oligomer
caggaaaaugccagagcuugu

SEQ ID NO: 20236 - RNA, 21 nt, artificial
  Oligomer
cugaauuuuguguguaccugu

SEQ ID NO: 20237 - RNA, 21 nt, artificial
  Oligomer
gaccucucaauuucuggaaaa

SEQ ID NO: 20238 - RNA, 21 nt, artificial
  Oligomer
cagagcacacuuaugggccaa

SEQ ID NO: 20239 - RNA, 21 nt, artificial
  Oligomer
ggacucccucuaaguggaaua

SEQ ID NO: 20240 - RNA, 21 nt, artificial
  Oligomer
gacauuaccaugaguaauaag

SEQ ID NO: 20241 - RNA, 21 nt, artificial
  Oligomer
guuccugggcaaccuuuuuga

SEQ ID NO: 20242 - RNA, 21 nt, artificial
  Oligomer
gggacugaguaacauucucuu

SEQ ID NO: 20243 - RNA, 21 nt, artificial
  Oligomer
gggagaaaugacuuugaaaac

SEQ ID NO: 20244 - RNA, 21 nt, artificial
  Oligomer
ggaaacuugcauacagagaca

SEQ ID NO: 20245 - RNA, 21 nt, artificial
  Oligomer
gcaacggaauuaggaagacca

SEQ ID NO: 20246 - RNA, 21 nt, artificial
  Oligomer
ccuugauaaugggaugaaugg

SEQ ID NO: 20247 - RNA, 21 nt, artificial
  Oligomer
agucuugaaacaagcaacaga

SEQ ID NO: 20248 - RNA, 21 nt, artificial
  Oligomer
gcuugugaacccuguuucucu

SEQ ID NO: 20249 - RNA, 21 nt, artificial
  Oligomer
auuaggagaggcagagauaga

SEQ ID NO: 20250 - RNA, 21 nt, artificial
  Oligomer
ggaguucucaucccucuguca

SEQ ID NO: 20251 - RNA, 21 nt, artificial
  Oligomer
ggcaaaaagacauuaccauga

SEQ ID NO: 20252 - RNA, 21 nt, artificial
  Oligomer
gugaacagaccaagaaaagag

SEQ ID NO: 20253 - RNA, 21 nt, artificial
  Oligomer
gaugguuuucugucuaauucu

SEQ ID NO: 20254 - RNA, 21 nt, artificial
  Oligomer
cugauguuacgagcaauauga

SEQ ID NO: 20255 - RNA, 21 nt, artificial
  Oligomer
gcuaacuucagucaaccugaa

SEQ ID NO: 20256 - RNA, 21 nt, artificial
  Oligomer
guuuugauucggacaguugga

SEQ ID NO: 20257 - RNA, 21 nt, artificial
  Oligomer
gagguauacuuaggcaaagag

SEQ ID NO: 20258 - RNA, 21 nt, artificial
  Oligomer
aaugagguauacuuaggcaaa

SEQ ID NO: 20259 - RNA, 21 nt, artificial
  Oligomer
cuggcuaguuucuaacauguu

SEQ ID NO: 20260 - RNA, 21 nt, artificial
  Oligomer
cugagugagcuaguaguauuu

SEQ ID NO: 20261 - RNA, 21 nt, artificial
  Oligomer
gacagauauacugggagaaau

SEQ ID NO: 20262 - RNA, 21 nt, artificial
  Oligomer
acuugcauacagagacagaua

SEQ ID NO: 20263 - RNA, 21 nt, artificial
  Oligomer
uuaggaagaccaagacacaga

SEQ ID NO: 20264 - RNA, 21 nt, artificial
  Oligomer
cuugaagaacugacuagugag

SEQ ID NO: 20265 - RNA, 21 nt, artificial
  Oligomer
gugaacccuguuucucuugaa

SEQ ID NO: 20266 - RNA, 21 nt, artificial
  Oligomer
gaauaaacaggaaaaugccag

SEQ ID NO: 20267 - RNA, 21 nt, artificial
  Oligomer
uaguggagagaacugaauaaa

SEQ ID NO: 20268 - RNA, 21 nt, artificial
  Oligomer
auaguggagagaacugaauaa

SEQ ID NO: 20269 - RNA, 21 nt, artificial
  Oligomer
cuuaauggcucaugaccugga

SEQ ID NO: 20270 - RNA, 21 nt, artificial
  Oligomer
gucuaauucuauggaaaugga

SEQ ID NO: 20271 - RNA, 21 nt, artificial
  Oligomer
gaccaucuucuguauucugga

SEQ ID NO: 20272 - RNA, 21 nt, artificial
  Oligomer
caauaugaccaucuucuguau

SEQ ID NO: 20273 - RNA, 21 nt, artificial
  Oligomer
guacgacguuuccaucagcuu

SEQ ID NO: 20274 - RNA, 21 nt, artificial
  Oligomer
aauuugaccugcucaucuaua

SEQ ID NO: 20275 - RNA, 21 nt, artificial
  Oligomer
gcaccuggcuaguuucuaaca

SEQ ID NO: 20276 - RNA, 21 nt, artificial
  Oligomer
aaacuugcauacagagacaga

SEQ ID NO: 20277 - RNA, 21 nt, artificial
  Oligomer
uugauaaugggaugaauggaa

SEQ ID NO: 20278 - RNA, 21 nt, artificial
  Oligomer
caagucuugaaacaagcaaca

SEQ ID NO: 20279 - RNA, 21 nt, artificial
  Oligomer
caacaagccauaguggagaga

SEQ ID NO: 20280 - RNA, 21 nt, artificial
  Oligomer
uuguguguaccugugacuaaa

SEQ ID NO: 20281 - RNA, 21 nt, artificial
  Oligomer
caauaccuccuccagaucaga

SEQ ID NO: 20282 - RNA, 21 nt, artificial
  Oligomer
cccuuuccuuuguaaguuccu

SEQ ID NO: 20283 - RNA, 21 nt, artificial
  Oligomer
gaagaugaguguuuugcuaag

SEQ ID NO: 20284 - RNA, 21 nt, artificial
  Oligomer
aaauuugaccugcucaucuau

SEQ ID NO: 20285 - RNA, 21 nt, artificial
  Oligomer
caucacaaaaagcccacagga

SEQ ID NO: 20286 - RNA, 21 nt, artificial
  Oligomer
gggcuuguaucaauguaucau

SEQ ID NO: 20287 - RNA, 21 nt, artificial
  Oligomer
caaagagaaauuugacagugu

SEQ ID NO: 20288 - RNA, 21 nt, artificial
  Oligomer
gacaagcuuguccauguaaua

SEQ ID NO: 20289 - RNA, 21 nt, artificial
  Oligomer
cuuugaaaaccuggcucuaag

SEQ ID NO: 20290 - RNA, 21 nt, artificial
  Oligomer
acuuugaaaaccuggcucuaa

SEQ ID NO: 20291 - RNA, 21 nt, artificial
  Oligomer
agacagauauacugggagaaa

SEQ ID NO: 20292 - RNA, 21 nt, artificial
  Oligomer
uugcauacagagacagauaua

SEQ ID NO: 20293 - RNA, 21 nt, artificial
  Oligomer
ccaucaccuugauaaugggau

SEQ ID NO: 20294 - RNA, 21 nt, artificial
  Oligomer
cccaaguuauugggaugucau

SEQ ID NO: 20295 - RNA, 21 nt, artificial
  Oligomer
ugccaauuugcaaacucucaa

SEQ ID NO: 20296 - RNA, 21 nt, artificial
  Oligomer
guuuuggugauacccaaguua

SEQ ID NO: 20297 - RNA, 21 nt, artificial
  Oligomer
cagauggauagucuguccaaa

SEQ ID NO: 20298 - RNA, 21 nt, artificial
  Oligomer
gagauagaaccuggagccacu

SEQ ID NO: 20299 - RNA, 21 nt, artificial
  Oligomer
cucugaagauucaagcuuauu

SEQ ID NO: 20300 - RNA, 21 nt, artificial
  Oligomer
uuuguguguaccugugacuaa

SEQ ID NO: 20301 - RNA, 21 nt, artificial
  Oligomer
aaggcaaaaagacauuaccau

SEQ ID NO: 20302 - RNA, 21 nt, artificial
  Oligomer
ugaguaacauucucuuuguga

SEQ ID NO: 20303 - RNA, 21 nt, artificial
  Oligomer
ccauauaccugaaagaucuga

SEQ ID NO: 20304 - RNA, 21 nt, artificial
  Oligomer
acuaugggacugaguaacauu

SEQ ID NO: 20305 - RNA, 21 nt, artificial
  Oligomer
uauggaaauggaagaagaaga

SEQ ID NO: 20306 - RNA, 21 nt, artificial
  Oligomer
guguuaugcagaaaucucaag

SEQ ID NO: 20307 - RNA, 21 nt, artificial
  Oligomer
cuaucgaguaugaugguguua

SEQ ID NO: 20308 - RNA, 21 nt, artificial
  Oligomer
ccaagaauucaacuaucgagu

SEQ ID NO: 20309 - RNA, 21 nt, artificial
  Oligomer
aguguuuugcuaagaaccaag

SEQ ID NO: 20310 - RNA, 21 nt, artificial
  Oligomer
ugaacugucagugcuugcuaa

SEQ ID NO: 20311 - RNA, 21 nt, artificial
  Oligomer
aacuugguucugaaugaggua

SEQ ID NO: 20312 - RNA, 21 nt, artificial
  Oligomer
auuuuggcaggaccaggaaaa

SEQ ID NO: 20313 - RNA, 21 nt, artificial
  Oligomer
ccauguaauauucccauguuu

SEQ ID NO: 20314 - RNA, 21 nt, artificial
  Oligomer
gauagucuguccaaauggaca

SEQ ID NO: 20315 - RNA, 21 nt, artificial
  Oligomer
cccuguuucucuugaagaacu

SEQ ID NO: 20316 - RNA, 21 nt, artificial
  Oligomer
caacaaugagcagaccaaccu

SEQ ID NO: 20317 - RNA, 21 nt, artificial
  Oligomer
gccuaggguacaggcaacaau

SEQ ID NO: 20318 - RNA, 21 nt, artificial
  Oligomer
gucugggugggacuuauguau

SEQ ID NO: 20319 - RNA, 21 nt, artificial
  Oligomer
uugauuucuuccagaaggcaa

SEQ ID NO: 20320 - RNA, 21 nt, artificial
  Oligomer
uuucuacccuuuccuuuguaa

SEQ ID NO: 20321 - RNA, 21 nt, artificial
  Oligomer
cauauaccugaaagaucugau

SEQ ID NO: 20322 - RNA, 21 nt, artificial
  Oligomer
cacuaugggacugaguaacau

SEQ ID NO: 20323 - RNA, 21 nt, artificial
  Oligomer
aauggagagggaagagaguga

SEQ ID NO: 20324 - RNA, 21 nt, artificial
  Oligomer
cgcaacucuuauaaaugugga

SEQ ID NO: 20325 - RNA, 21 nt, artificial
  Oligomer
agcuguacuuccaacaguuau

SEQ ID NO: 20326 - RNA, 21 nt, artificial
  Oligomer
gaugguguuaugcagaaaucu

SEQ ID NO: 20327 - RNA, 21 nt, artificial
  Oligomer
ggacaagggcuuguaucaaug

SEQ ID NO: 20328 - RNA, 21 nt, artificial
  Oligomer
ucacaaucuucagaucaagga

SEQ ID NO: 20329 - RNA, 21 nt, artificial
  Oligomer
aguuggacccugagacuucac

SEQ ID NO: 20330 - RNA, 21 nt, artificial
  Oligomer
gacaguguucauuccaaguau

SEQ ID NO: 20331 - RNA, 21 nt, artificial
  Oligomer
gagugagcuaguaguauuuug

SEQ ID NO: 20332 - RNA, 21 nt, artificial
  Oligomer
cagauauacugggagaaauga

SEQ ID NO: 20333 - RNA, 21 nt, artificial
  Oligomer
cauagggcuagcaaauuugag

SEQ ID NO: 20334 - RNA, 21 nt, artificial
  Oligomer
uuugcaaacucucaaaaccaa

SEQ ID NO: 20335 - RNA, 21 nt, artificial
  Oligomer
agaaccaaaagagaucacaau

SEQ ID NO: 20336 - RNA, 21 nt, artificial
  Oligomer
cuguuucucuugaagaacuga

SEQ ID NO: 20337 - RNA, 21 nt, artificial
  Oligomer
aguaaggaaaacgguggccua

SEQ ID NO: 20338 - RNA, 21 nt, artificial
  Oligomer
gugacuaaacaacuaccuccu

SEQ ID NO: 20339 - RNA, 21 nt, artificial
  Oligomer
augccaagaggagacuuuaau

SEQ ID NO: 20340 - RNA, 21 nt, artificial
  Oligomer
agcccauacaaguauucauuu

SEQ ID NO: 20341 - RNA, 21 nt, artificial
  Oligomer
aagaguaaagcccauacaagu

SEQ ID NO: 20342 - RNA, 21 nt, artificial
  Oligomer
agacaucuucaugcgacaaaa

SEQ ID NO: 20343 - RNA, 21 nt, artificial
  Oligomer
gcggccucgcaacucuuauaa

SEQ ID NO: 20344 - RNA, 21 nt, artificial
  Oligomer
auuccuuggauuacagcugua

SEQ ID NO: 20345 - RNA, 21 nt, artificial
  Oligomer
ccaucagcuugucuguuucau

SEQ ID NO: 20346 - RNA, 21 nt, artificial
  Oligomer
ucucaagauaaugucacagaa

SEQ ID NO: 20347 - RNA, 21 nt, artificial
  Oligomer
uaugaugguguuaugcagaaa

SEQ ID NO: 20348 - RNA, 21 nt, artificial
  Oligomer
cuaagaaccaagaauucaacu

SEQ ID NO: 20349 - RNA, 21 nt, artificial
  Oligomer
ugaguguuuugcuaagaacca

SEQ ID NO: 20350 - RNA, 21 nt, artificial
  Oligomer
acgguuacccagaaccuaaga

SEQ ID NO: 20351 - RNA, 21 nt, artificial
  Oligomer
agcccacaggaaugauucgca

SEQ ID NO: 20352 - RNA, 21 nt, artificial
  Oligomer
ccugagacuucacaaucuuca

SEQ ID NO: 20353 - RNA, 21 nt, artificial
  Oligomer
aaccaaagccugagugagcua

SEQ ID NO: 20354 - RNA, 21 nt, artificial
  Oligomer
agauauacugggagaaaugac

SEQ ID NO: 20355 - RNA, 21 nt, artificial
  Oligomer
acuuagccuacagauguccua

SEQ ID NO: 20356 - RNA, 21 nt, artificial
  Oligomer
aguggagagaacugaauaaac

SEQ ID NO: 20357 - RNA, 21 nt, artificial
  Oligomer
gguacaggcaacaaugagcag

SEQ ID NO: 20358 - RNA, 21 nt, artificial
  Oligomer
aaguggaauagccucccugua

SEQ ID NO: 20359 - RNA, 21 nt, artificial
  Oligomer
gagggaagagagugaacagac

SEQ ID NO: 20360 - RNA, 21 nt, artificial
  Oligomer
caacacaauggagagggaaga

SEQ ID NO: 20361 - RNA, 21 nt, artificial
  Oligomer
ccucgcaacucuuauaaaugu

SEQ ID NO: 20362 - RNA, 21 nt, artificial
  Oligomer
ccuuggauuacagcuguacuu

SEQ ID NO: 20363 - RNA, 21 nt, artificial
  Oligomer
uaaugucacagaacuguacga

SEQ ID NO: 20364 - RNA, 21 nt, artificial
  Oligomer
uguuaugcagaaaucucaaga

SEQ ID NO: 20365 - RNA, 21 nt, artificial
  Oligomer
cccacaggaaugauucgcauc

SEQ ID NO: 20366 - RNA, 21 nt, artificial
  Oligomer
ugacaguguucauuccaagua

SEQ ID NO: 20367 - RNA, 21 nt, artificial
  Oligomer
aguaguauuuuggcaggacca

SEQ ID NO: 20368 - RNA, 21 nt, artificial
  Oligomer
agacaagcuuguccauguaau

SEQ ID NO: 20369 - RNA, 21 nt, artificial
  Oligomer
gcuagacaagcuuguccaugu

SEQ ID NO: 20370 - RNA, 21 nt, artificial
  Oligomer
ucaaggguuauagacugccau

SEQ ID NO: 20371 - RNA, 21 nt, artificial
  Oligomer
ggagccugagccacaaaaaug

SEQ ID NO: 20372 - RNA, 21 nt, artificial
  Oligomer
gcuagcaaauuugaguuggau

SEQ ID NO: 20373 - RNA, 21 nt, artificial
  Oligomer
cccagcauagggcuagcaaau

SEQ ID NO: 20374 - RNA, 21 nt, artificial
  Oligomer
aauuaggaagaccaagacaca

SEQ ID NO: 20375 - RNA, 21 nt, artificial
  Oligomer
gaauuaggaagaccaagacac

SEQ ID NO: 20376 - RNA, 21 nt, artificial
  Oligomer
aggaagagcugcaacggaauu

SEQ ID NO: 20377 - RNA, 21 nt, artificial
  Oligomer
ggaggcuuaggacuuuccacu

SEQ ID NO: 20378 - RNA, 21 nt, artificial
  Oligomer
gauaaugggaugaauggaagg

SEQ ID NO: 20379 - RNA, 21 nt, artificial
  Oligomer
gacauaagacagacagcaguu

SEQ ID NO: 20380 - RNA, 21 nt, artificial
  Oligomer
gcuuauuucaaugagacugca

SEQ ID NO: 20381 - RNA, 21 nt, artificial
  Oligomer
guaugccaagaggagacuuua

SEQ ID NO: 20382 - RNA, 21 nt, artificial
  Oligomer
agaguaaagcccauacaagua

SEQ ID NO: 20383 - RNA, 21 nt, artificial
  Oligomer
ugaaagaucugaugaagccca

SEQ ID NO: 20384 - RNA, 21 nt, artificial
  Oligomer
uggagagggaagagagugaac

SEQ ID NO: 20385 - RNA, 21 nt, artificial
  Oligomer
gugaugguuuucugucuaauu

SEQ ID NO: 20386 - RNA, 21 nt, artificial
  Oligomer
cgagcaauaugaccaucuucu

SEQ ID NO: 20387 - RNA, 21 nt, artificial
  Oligomer
ccugauguuacgagcaauaug

SEQ ID NO: 20388 - RNA, 21 nt, artificial
  Oligomer
caucagcuugucuguuucauu

SEQ ID NO: 20389 - RNA, 21 nt, artificial
  Oligomer
gaugaguguuuugcuaagaac

SEQ ID NO: 20390 - RNA, 21 nt, artificial
  Oligomer
ucuauacacgguuacccagaa

SEQ ID NO: 20391 - RNA, 21 nt, artificial
  Oligomer
ugucagugcuugcuaacuuca

SEQ ID NO: 20392 - RNA, 21 nt, artificial
  Oligomer
guuggacccugagacuucaca

SEQ ID NO: 20393 - RNA, 21 nt, artificial
  Oligomer
ccgcacaaguuuugauucgga

SEQ ID NO: 20394 - RNA, 21 nt, artificial
  Oligomer
aguauaugggccgcacaaguu

SEQ ID NO: 20395 - RNA, 21 nt, artificial
  Oligomer
aauuugacaguguucauucca

SEQ ID NO: 20396 - RNA, 21 nt, artificial
  Oligomer
gcaggaccaggaaaacuuggu

SEQ ID NO: 20397 - RNA, 21 nt, artificial
  Oligomer
aguauuuuggcaggaccagga

SEQ ID NO: 20398 - RNA, 21 nt, artificial
  Oligomer
gccugagugagcuaguaguau

SEQ ID NO: 20399 - RNA, 21 nt, artificial
  Oligomer
gagaaaugacuuugaaaaccu

SEQ ID NO: 20400 - RNA, 21 nt, artificial
  Oligomer
gcaaauuugaguuggaugauu

SEQ ID NO: 20401 - RNA, 21 nt, artificial
  Oligomer
cuagcaaauuugaguuggaug

SEQ ID NO: 20402 - RNA, 21 nt, artificial
  Oligomer
cuugauaaugggaugaaugga

SEQ ID NO: 20403 - RNA, 21 nt, artificial
  Oligomer
gaaccuggagccacuucuauc

SEQ ID NO: 20404 - RNA, 21 nt, artificial
  Oligomer
gggaaauuaggagaggcagag

SEQ ID NO: 20405 - RNA, 21 nt, artificial
  Oligomer
aacaaugagcagaccaaccua

SEQ ID NO: 20406 - RNA, 21 nt, artificial
  Oligomer
cucaugaccuggaaauaaaau

SEQ ID NO: 20407 - RNA, 21 nt, artificial
  Oligomer
gauuucuuccagaaggcaaaa

SEQ ID NO: 20408 - RNA, 21 nt, artificial
  Oligomer
accuuuuugauuucuuccaga

SEQ ID NO: 20409 - RNA, 21 nt, artificial
  Oligomer
gcccauacaaguauucauuuu

SEQ ID NO: 20410 - RNA, 21 nt, artificial
  Oligomer
ugugaugguuuucugucuaau

SEQ ID NO: 20411 - RNA, 21 nt, artificial
  Oligomer
guuuugcuaagaaccaagaau

SEQ ID NO: 20412 - RNA, 21 nt, artificial
  Oligomer
ccuaagaagaugaguguuuug

SEQ ID NO: 20413 - RNA, 21 nt, artificial
  Oligomer
aggaaugauucgcauccacca

SEQ ID NO: 20414 - RNA, 21 nt, artificial
  Oligomer
caaguauaugggccgcacaag

SEQ ID NO: 20415 - RNA, 21 nt, artificial
  Oligomer
agagaaauuugacaguguuca

SEQ ID NO: 20416 - RNA, 21 nt, artificial
  Oligomer
guucugaaugagguauacuua

SEQ ID NO: 20417 - RNA, 21 nt, artificial
  Oligomer
ggaccaggaaaacuugguucu

SEQ ID NO: 20418 - RNA, 21 nt, artificial
  Oligomer
ugagcuaguaguauuuuggca

SEQ ID NO: 20419 - RNA, 21 nt, artificial
  Oligomer
cauguuuugugcagcacaguu

SEQ ID NO: 20420 - RNA, 21 nt, artificial
  Oligomer
ccuggcuaguuucuaacaugu

SEQ ID NO: 20421 - RNA, 21 nt, artificial
  Oligomer
cugccuugauuagacuccuag

SEQ ID NO: 20422 - RNA, 21 nt, artificial
  Oligomer
uguaaacccucaaggguuaua

SEQ ID NO: 20423 - RNA, 21 nt, artificial
  Oligomer
ccaaagccugagugagcuagu

SEQ ID NO: 20424 - RNA, 21 nt, artificial
  Oligomer
gacuuugaaaaccuggcucua

SEQ ID NO: 20425 - RNA, 21 nt, artificial
  Oligomer
agagacagauauacugggaga

SEQ ID NO: 20426 - RNA, 21 nt, artificial
  Oligomer
cagagacagauauacugggag

SEQ ID NO: 20427 - RNA, 21 nt, artificial
  Oligomer
gaaacuugcauacagagacag

SEQ ID NO: 20428 - RNA, 21 nt, artificial
  Oligomer
ccagaggaaacuugcauacag

SEQ ID NO: 20429 - RNA, 21 nt, artificial
  Oligomer
uguccaaauggacauaagaca

SEQ ID NO: 20430 - RNA, 21 nt, artificial
  Oligomer
agucuguccaaauggacauaa

SEQ ID NO: 20431 - RNA, 21 nt, artificial
  Oligomer
ggauagucuguccaaauggac

SEQ ID NO: 20432 - RNA, 21 nt, artificial
  Oligomer
aagaaccaaaagagaucacaa

SEQ ID NO: 20433 - RNA, 21 nt, artificial
  Oligomer
uggagagaacugaauaaacag

SEQ ID NO: 20434 - RNA, 21 nt, artificial
  Oligomer
ugagcagaccaaccuaaauuu

SEQ ID NO: 20435 - RNA, 21 nt, artificial
  Oligomer
aaugagcagaccaaccuaaau

SEQ ID NO: 20436 - RNA, 21 nt, artificial
  Oligomer
ucugucagggucaguaaggaa

SEQ ID NO: 20437 - RNA, 21 nt, artificial
  Oligomer
cagucugggugggacuuaugu

SEQ ID NO: 20438 - RNA, 21 nt, artificial
  Oligomer
uuuuaucugcccagaauucua

SEQ ID NO: 20439 - RNA, 21 nt, artificial
  Oligomer
uuuucuacccuuuccuuugua

SEQ ID NO: 20440 - RNA, 21 nt, artificial
  Oligomer
aguaaagcccauacaaguauu

SEQ ID NO: 20441 - RNA, 21 nt, artificial
  Oligomer
acacaauggagagggaagaga

SEQ ID NO: 20442 - RNA, 21 nt, artificial
  Oligomer
ccaacacaauggagagggaag

SEQ ID NO: 20443 - RNA, 21 nt, artificial
  Oligomer
aagcggccucgcaacucuuau

SEQ ID NO: 20444 - RNA, 21 nt, artificial
  Oligomer
auggaaauggaagaagaagaa

SEQ ID NO: 20445 - RNA, 21 nt, artificial
  Oligomer
ucuguauucuggaaacugaca

SEQ ID NO: 20446 - RNA, 21 nt, artificial
  Oligomer
ugauguuacgagcaauaugac

SEQ ID NO: 20447 - RNA, 21 nt, artificial
  Oligomer
cauucccugauguuacgagca

SEQ ID NO: 20448 - RNA, 21 nt, artificial
  Oligomer
caagauaaugucacagaacug

SEQ ID NO: 20449 - RNA, 21 nt, artificial
  Oligomer
aucucaagauaaugucacaga

SEQ ID NO: 20450 - RNA, 21 nt, artificial
  Oligomer
caucuauacacgguuacccag

SEQ ID NO: 20451 - RNA, 21 nt, artificial
  Oligomer
gugcuugcuaacuucagucaa

SEQ ID NO: 20452 - RNA, 21 nt, artificial
  Oligomer
aauucugaacugucagugcuu

SEQ ID NO: 20453 - RNA, 21 nt, artificial
  Oligomer
gagacuucacaaucuucagau

SEQ ID NO: 20454 - RNA, 21 nt, artificial
  Oligomer
caaguuuugauucggacaguu

SEQ ID NO: 20455 - RNA, 21 nt, artificial
  Oligomer
aaguauaugggccgcacaagu

SEQ ID NO: 20456 - RNA, 21 nt, artificial
  Oligomer
uaggcaaagagaaauuugaca

SEQ ID NO: 20457 - RNA, 21 nt, artificial
  Oligomer
caaggguuauagacugccaug

SEQ ID NO: 20458 - RNA, 21 nt, artificial
  Oligomer
ccagcauagggcuagcaaauu

SEQ ID NO: 20459 - RNA, 21 nt, artificial
  Oligomer
aauggaaggaggcuuaggacu

SEQ ID NO: 20460 - RNA, 21 nt, artificial
  Oligomer
ugaauggaaggaggcuuagga

SEQ ID NO: 20461 - RNA, 21 nt, artificial
  Oligomer
ccaugccaauuugcaaacucu

SEQ ID NO: 20462 - RNA, 21 nt, artificial
  Oligomer
agauagaaccuggagccacuu

SEQ ID NO: 20463 - RNA, 21 nt, artificial
  Oligomer
uagugugauuacuaugcucua

SEQ ID NO: 20464 - RNA, 21 nt, artificial
  Oligomer
gaaacauagagaucuauguac

SEQ ID NO: 20465 - RNA, 21 nt, artificial
  Oligomer
cacugaauuuuguguguaccu

SEQ ID NO: 20466 - RNA, 21 nt, artificial
  Oligomer
uuaggaccaauaccuccucca

SEQ ID NO: 20467 - RNA, 21 nt, artificial
  Oligomer
cauucucuuugugauggccuu

SEQ ID NO: 20468 - RNA, 21 nt, artificial
  Oligomer
cguaugccaagaggagacuuu

SEQ ID NO: 20469 - RNA, 21 nt, artificial
  Oligomer
gcaaaaagacauuaccaugag

SEQ ID NO: 20470 - RNA, 21 nt, artificial
  Oligomer
gaaggcaaaaagacauuacca

SEQ ID NO: 20471 - RNA, 21 nt, artificial
  Oligomer
cauuuuuucuacccuuuccuu

SEQ ID NO: 20472 - RNA, 21 nt, artificial
  Oligomer
agcguguuuuuaaaaguucga

SEQ ID NO: 20473 - RNA, 21 nt, artificial
  Oligomer
gcccagcguguuuuuaaaagu

SEQ ID NO: 20474 - RNA, 21 nt, artificial
  Oligomer
agagggaagagagugaacaga

SEQ ID NO: 20475 - RNA, 21 nt, artificial
  Oligomer
cuguuucauucccugauguua

SEQ ID NO: 20476 - RNA, 21 nt, artificial
  Oligomer
aucuauacacgguuacccaga

SEQ ID NO: 20477 - RNA, 21 nt, artificial
  Oligomer
uaaauuugaccugcucaucua

SEQ ID NO: 20478 - RNA, 21 nt, artificial
  Oligomer
ccugaaauaguaccaauuucu

SEQ ID NO: 20479 - RNA, 21 nt, artificial
  Oligomer
acauguuuugugcagcacagu

SEQ ID NO: 20480 - RNA, 21 nt, artificial
  Oligomer
gagccugagccacaaaaaugu

SEQ ID NO: 20481 - RNA, 21 nt, artificial
  Oligomer
cucuaaggugggaucacuaag

SEQ ID NO: 20482 - RNA, 21 nt, artificial
  Oligomer
gauauacugggagaaaugacu

SEQ ID NO: 20483 - RNA, 21 nt, artificial
  Oligomer
ggcaaccagaggaaacuugca

SEQ ID NO: 20484 - RNA, 21 nt, artificial
  Oligomer
gaauggaaggaggcuuaggac

SEQ ID NO: 20485 - RNA, 21 nt, artificial
  Oligomer
gaugaauggaaggaggcuuag

SEQ ID NO: 20486 - RNA, 21 nt, artificial
  Oligomer
caauuugcaaacucucaaaac

SEQ ID NO: 20487 - RNA, 21 nt, artificial
  Oligomer
uccaaauggacauaagacaga

SEQ ID NO: 20488 - RNA, 21 nt, artificial
  Oligomer
ucuguccaaauggacauaaga

SEQ ID NO: 20489 - RNA, 21 nt, artificial
  Oligomer
caagcaacagauggauagucu

SEQ ID NO: 20490 - RNA, 21 nt, artificial
  Oligomer
ugaagaacugacuagugagau

SEQ ID NO: 20491 - RNA, 21 nt, artificial
  Oligomer
cuuauuucaaugagacugcag

SEQ ID NO: 20492 - RNA, 21 nt, artificial
  Oligomer
agucugggugggacuuaugua

SEQ ID NO: 20493 - RNA, 21 nt, artificial
  Oligomer
cugugacuaaacaacuaccuc

SEQ ID NO: 20494 - RNA, 21 nt, artificial
  Oligomer
uuuagguuggucugcucauug

SEQ ID NO: 20495 - RNA, 21 nt, artificial
  Oligomer
uucucuuuucuuggucuguuc

SEQ ID NO: 20496 - RNA, 21 nt, artificial
  Oligomer
uuggucuguucacucucuucc

SEQ ID NO: 20497 - RNA, 21 nt, artificial
  Oligomer
uuucaaagucauuucucccag

SEQ ID NO: 20498 - RNA, 21 nt, artificial
  Oligomer
uuuuauuuccaggucaugagc

SEQ ID NO: 20499 - RNA, 21 nt, artificial
  Oligomer
uuagacagaaaaccaucacac

SEQ ID NO: 20500 - RNA, 21 nt, artificial
  Oligomer
uugccuaaguauaccucauuc

SEQ ID NO: 20501 - RNA, 21 nt, artificial
  Oligomer
uuucucuuuucuuggucuguu

SEQ ID NO: 20502 - RNA, 21 nt, artificial
  Oligomer
uuuauaagaguugcgaggccg

SEQ ID NO: 20503 - RNA, 21 nt, artificial
  Oligomer
uuagcaaaacacucaucuucu

SEQ ID NO: 20504 - RNA, 21 nt, artificial
  Oligomer
uuucuuggucuguucacucuc

SEQ ID NO: 20505 - RNA, 21 nt, artificial
  Oligomer
uuugguucuuucacagcuucc

SEQ ID NO: 20506 - RNA, 21 nt, artificial
  Oligomer
uucugcauaacaccaucauac

SEQ ID NO: 20507 - RNA, 21 nt, artificial
  Oligomer
auaaauacauaagucccaccc

SEQ ID NO: 20508 - RNA, 21 nt, artificial
  Oligomer
uuuccagaauacagaagaugg

SEQ ID NO: 20509 - RNA, 21 nt, artificial
  Oligomer
auauacuuggaaugaacacug

SEQ ID NO: 20510 - RNA, 21 nt, artificial
  Oligomer
uuuauguuugggcagagacug

SEQ ID NO: 20511 - RNA, 21 nt, artificial
  Oligomer
uuccguugcagcucuuccucu

SEQ ID NO: 20512 - RNA, 21 nt, artificial
  Oligomer
uugagauuucugcauaacacc

SEQ ID NO: 20513 - RNA, 21 nt, artificial
  Oligomer
uuagugaucccaccuuagagc

SEQ ID NO: 20514 - RNA, 21 nt, artificial
  Oligomer
uucucuuugccuaaguauacc

SEQ ID NO: 20515 - RNA, 21 nt, artificial
  Oligomer
uucagaaccaaguuuuccugg

SEQ ID NO: 20516 - RNA, 21 nt, artificial
  Oligomer
uagugaucccaccuuagagcc

SEQ ID NO: 20517 - RNA, 21 nt, artificial
  Oligomer
auuccguugcagcucuuccuc

SEQ ID NO: 20518 - RNA, 21 nt, artificial
  Oligomer
cuuuucuuggucuguucacuc

SEQ ID NO: 20519 - RNA, 21 nt, artificial
  Oligomer
uucuuagcaaaacacucaucu

SEQ ID NO: 20520 - RNA, 21 nt, artificial
  Oligomer
uuuugguucuuucacagcuuc

SEQ ID NO: 20521 - RNA, 21 nt, artificial
  Oligomer
uuuccuuacugacccugacag

SEQ ID NO: 20522 - RNA, 21 nt, artificial
  Oligomer
ucucuuuucuuggucuguuca

SEQ ID NO: 20523 - RNA, 21 nt, artificial
  Oligomer
uuccacauuuauaagaguugc

SEQ ID NO: 20524 - RNA, 21 nt, artificial
  Oligomer
uuggaaguacagcuguaaucc

SEQ ID NO: 20525 - RNA, 21 nt, artificial
  Oligomer
ugcauaacaccaucauacucg

SEQ ID NO: 20526 - RNA, 21 nt, artificial
  Oligomer
uaagccuccuuccauucaucc

SEQ ID NO: 20527 - RNA, 21 nt, artificial
  Oligomer
uuuuucucuuuucuuggucug

SEQ ID NO: 20528 - RNA, 21 nt, artificial
  Oligomer
ucuagagcauaguaaucacac

SEQ ID NO: 20529 - RNA, 21 nt, artificial
  Oligomer
uucacaagcucuggcauuuuc

SEQ ID NO: 20530 - RNA, 21 nt, artificial
  Oligomer
uucaguucucuccacuauggc

SEQ ID NO: 20531 - RNA, 21 nt, artificial
  Oligomer
ugaggagguaguuguuuaguc

SEQ ID NO: 20532 - RNA, 21 nt, artificial
  Oligomer
ucugguggaugcgaaucauuc

SEQ ID NO: 20533 - RNA, 21 nt, artificial
  Oligomer
uuugugauggaugauacauug

SEQ ID NO: 20534 - RNA, 21 nt, artificial
  Oligomer
uuggucuuccuaauuccguug

SEQ ID NO: 20535 - RNA, 21 nt, artificial
  Oligomer
uuuauuuccaggucaugagcc

SEQ ID NO: 20536 - RNA, 21 nt, artificial
  Oligomer
uagcauggcagucuauaaccc

SEQ ID NO: 20537 - RNA, 21 nt, artificial
  Oligomer
uugcccaggaacuuacaaagg

SEQ ID NO: 20538 - RNA, 21 nt, artificial
  Oligomer
ucuuuucuuggucuguucacu

SEQ ID NO: 20539 - RNA, 21 nt, artificial
  Oligomer
uacagaagauggucauauugc

SEQ ID NO: 20540 - RNA, 21 nt, artificial
  Oligomer
uugguucuuagcaaaacacuc

SEQ ID NO: 20541 - RNA, 21 nt, artificial
  Oligomer
ucaaauuugcuagcccuaugc

SEQ ID NO: 20542 - RNA, 21 nt, artificial
  Oligomer
uuuccuguuuauucaguucuc

SEQ ID NO: 20543 - RNA, 21 nt, artificial
  Oligomer
uuguuuagucacagguacaca

SEQ ID NO: 20544 - RNA, 21 nt, artificial
  Oligomer
ucacagguacacacaaaauuc

SEQ ID NO: 20545 - RNA, 21 nt, artificial
  Oligomer
uugugcggcccauauacuugg

SEQ ID NO: 20546 - RNA, 21 nt, artificial
  Oligomer
uuucucuuugccuaaguauac

SEQ ID NO: 20547 - RNA, 21 nt, artificial
  Oligomer
ucuguaugcaaguuuccucug

SEQ ID NO: 20548 - RNA, 21 nt, artificial
  Oligomer
ucucuuuugguucuuucacag

SEQ ID NO: 20549 - RNA, 21 nt, artificial
  Oligomer
ucacaagcucuggcauuuucc

SEQ ID NO: 20550 - RNA, 21 nt, artificial
  Oligomer
uauucaguucucuccacuaug

SEQ ID NO: 20551 - RNA, 21 nt, artificial
  Oligomer
uuuucuuggucuguucacucu

SEQ ID NO: 20552 - RNA, 21 nt, artificial
  Oligomer
uuagguucuggguaaccgugu

SEQ ID NO: 20553 - RNA, 21 nt, artificial
  Oligomer
uuccuaauuccguugcagcuc

SEQ ID NO: 20554 - RNA, 21 nt, artificial
  Oligomer
uaauuccguugcagcucuucc

SEQ ID NO: 20555 - RNA, 21 nt, artificial
  Oligomer
uuuugagaguuugcaaauugg

SEQ ID NO: 20556 - RNA, 21 nt, artificial
  Oligomer
uuugagaguuugcaaauuggc

SEQ ID NO: 20557 - RNA, 21 nt, artificial
  Oligomer
uauccaucuguugcuuguuuc

SEQ ID NO: 20558 - RNA, 21 nt, artificial
  Oligomer
auucaguucucuccacuaugg

SEQ ID NO: 20559 - RNA, 21 nt, artificial
  Oligomer
ucauaaauacauaagucccac

SEQ ID NO: 20560 - RNA, 21 nt, artificial
  Oligomer
uuacagggaggcuauuccacu

SEQ ID NO: 20561 - RNA, 21 nt, artificial
  Oligomer
auacuuguaugggcuuuacuc

SEQ ID NO: 20562 - RNA, 21 nt, artificial
  Oligomer
uugguuccacauuuauaagag

SEQ ID NO: 20563 - RNA, 21 nt, artificial
  Oligomer
uugucaguuuccagaauacag

SEQ ID NO: 20564 - RNA, 21 nt, artificial
  Oligomer
uuucagguugacugaaguuag

SEQ ID NO: 20565 - RNA, 21 nt, artificial
  Oligomer
uguccgaaucaaaacuugugc

SEQ ID NO: 20566 - RNA, 21 nt, artificial
  Oligomer
uuaaaaacacgcugggcuuca

SEQ ID NO: 20567 - RNA, 21 nt, artificial
  Oligomer
uucuuggucuguucacucucu

SEQ ID NO: 20568 - RNA, 21 nt, artificial
  Oligomer
uguuacucagucccauagugc

SEQ ID NO: 20569 - RNA, 21 nt, artificial
  Oligomer
uugaauucuugguucuuagca

SEQ ID NO: 20570 - RNA, 21 nt, artificial
  Oligomer
uaugcaaguuuccucugguug

SEQ ID NO: 20571 - RNA, 21 nt, artificial
  Oligomer
uugccuugagcaaaaacaauc

SEQ ID NO: 20572 - RNA, 21 nt, artificial
  Oligomer
ugucuuggucuuccuaauucc

SEQ ID NO: 20573 - RNA, 21 nt, artificial
  Oligomer
uccuaauuccguugcagcucu

SEQ ID NO: 20574 - RNA, 21 nt, artificial
  Oligomer
ucauuguugccuguacccuag

SEQ ID NO: 20575 - RNA, 21 nt, artificial
  Oligomer
uucuggaagaaaucaaaaagg

SEQ ID NO: 20576 - RNA, 21 nt, artificial
  Oligomer
ugauacauugauacaagcccu

SEQ ID NO: 20577 - RNA, 21 nt, artificial
  Oligomer
ucucuguaugcaaguuuccuc

SEQ ID NO: 20578 - RNA, 21 nt, artificial
  Oligomer
uaucaaggugauggcucuccc

SEQ ID NO: 20579 - RNA, 21 nt, artificial
  Oligomer
ucuucaagagaaacaggguuc

SEQ ID NO: 20580 - RNA, 21 nt, artificial
  Oligomer
uuuuaaaaacacgcugggcuu

SEQ ID NO: 20581 - RNA, 21 nt, artificial
  Oligomer
uuuaaaaacacgcugggcuuc

SEQ ID NO: 20582 - RNA, 21 nt, artificial
  Oligomer
auuuggacagacuauccaucu

SEQ ID NO: 20583 - RNA, 21 nt, artificial
  Oligomer
uuuuccuuacugacccugaca

SEQ ID NO: 20584 - RNA, 21 nt, artificial
  Oligomer
uucucuagagcauaguaauca

SEQ ID NO: 20585 - RNA, 21 nt, artificial
  Oligomer
ugucgcaugaagaugucuucg

SEQ ID NO: 20586 - RNA, 21 nt, artificial
  Oligomer
uucaucugguggaugcgaauc

SEQ ID NO: 20587 - RNA, 21 nt, artificial
  Oligomer
aauauuacauggacaagcuug

SEQ ID NO: 20588 - RNA, 21 nt, artificial
  Oligomer
uccaacucaaauuugcuagcc

SEQ ID NO: 20589 - RNA, 21 nt, artificial
  Oligomer
uugguucuuucacagcuuccc

SEQ ID NO: 20590 - RNA, 21 nt, artificial
  Oligomer
uacaguacauagaucucuaug

SEQ ID NO: 20591 - RNA, 21 nt, artificial
  Oligomer
uuccacuuagagggaguccug

SEQ ID NO: 20592 - RNA, 21 nt, artificial
  Oligomer
uaucacuuuugucgcaugaag

SEQ ID NO: 20593 - RNA, 21 nt, artificial
  Oligomer
uuugucgcaugaagaugucuu

SEQ ID NO: 20594 - RNA, 21 nt, artificial
  Oligomer
uggucuguucacucucuuccc

SEQ ID NO: 20595 - RNA, 21 nt, artificial
  Oligomer
uguugguuccacauuuauaag

SEQ ID NO: 20596 - RNA, 21 nt, artificial
  Oligomer
uucuucuuccauuuccauaga

SEQ ID NO: 20597 - RNA, 21 nt, artificial
  Oligomer
uaacuguuggaaguacagcug

SEQ ID NO: 20598 - RNA, 21 nt, artificial
  Oligomer
ugagauuucugcauaacacca

SEQ ID NO: 20599 - RNA, 21 nt, artificial
  Oligomer
uacucgauaguugaauucuug

SEQ ID NO: 20600 - RNA, 21 nt, artificial
  Oligomer
uucuuagguucuggguaaccg

SEQ ID NO: 20601 - RNA, 21 nt, artificial
  Oligomer
uggaugauacauugauacaag

SEQ ID NO: 20602 - RNA, 21 nt, artificial
  Oligomer
auacauugauacaagcccuug

SEQ ID NO: 20603 - RNA, 21 nt, artificial
  Oligomer
auucagaaccaaguuuuccug

SEQ ID NO: 20604 - RNA, 21 nt, artificial
  Oligomer
uuuccugguccugccaaaaua

SEQ ID NO: 20605 - RNA, 21 nt, artificial
  Oligomer
ucuagcauggcagucuauaac

SEQ ID NO: 20606 - RNA, 21 nt, artificial
  Oligomer
cuagcauggcagucuauaacc

SEQ ID NO: 20607 - RNA, 21 nt, artificial
  Oligomer
uuauguuugggcagagacugc

SEQ ID NO: 20608 - RNA, 21 nt, artificial
  Oligomer
uauguuugggcagagacugcc

SEQ ID NO: 20609 - RNA, 21 nt, artificial
  Oligomer
uuaucaaggugauggcucucc

SEQ ID NO: 20610 - RNA, 21 nt, artificial
  Oligomer
ucuuuugguucuuucacagcu

SEQ ID NO: 20611 - RNA, 21 nt, artificial
  Oligomer
uauuagcaacagcccagauag

SEQ ID NO: 20612 - RNA, 21 nt, artificial
  Oligomer
uuucucuagagcauaguaauc

SEQ ID NO: 20613 - RNA, 21 nt, artificial
  Oligomer
ucacacuauuacaguacauag

SEQ ID NO: 20614 - RNA, 21 nt, artificial
  Oligomer
aaacauguaucacuuuugucg

SEQ ID NO: 20615 - RNA, 21 nt, artificial
  Oligomer
aacauguaucacuuuugucgc

SEQ ID NO: 20616 - RNA, 21 nt, artificial
  Oligomer
ucucuuugccuaaguauaccu

SEQ ID NO: 20617 - RNA, 21 nt, artificial
  Oligomer
aaguauaccucauucagaacc

SEQ ID NO: 20618 - RNA, 21 nt, artificial
  Oligomer
uauaccucauucagaaccaag

SEQ ID NO: 20619 - RNA, 21 nt, artificial
  Oligomer
uuccugguccugccaaaauac

SEQ ID NO: 20620 - RNA, 21 nt, artificial
  Oligomer
uuuucaaagucauuucuccca

SEQ ID NO: 20621 - RNA, 21 nt, artificial
  Oligomer
cucuguaugcaaguuuccucu

SEQ ID NO: 20622 - RNA, 21 nt, artificial
  Oligomer
uucccguaggacaucuguagg

SEQ ID NO: 20623 - RNA, 21 nt, artificial
  Oligomer
uuugguuuugagaguuugcaa

SEQ ID NO: 20624 - RNA, 21 nt, artificial
  Oligomer
uguuucaagacuuguugaugg

SEQ ID NO: 20625 - RNA, 21 nt, artificial
  Oligomer
uccuguuuauucaguucucuc

SEQ ID NO: 20626 - RNA, 21 nt, artificial
  Oligomer
uccagguucuaucucugccuc

SEQ ID NO: 20627 - RNA, 21 nt, artificial
  Oligomer
ucucugccucuccuaauuucc

SEQ ID NO: 20628 - RNA, 21 nt, artificial
  Oligomer
uuagguuggucugcucauugu

SEQ ID NO: 20629 - RNA, 21 nt, artificial
  Oligomer
uaguuguuuagucacagguac

SEQ ID NO: 20630 - RNA, 21 nt, artificial
  Oligomer
uugaaucuucagaggagcagc

SEQ ID NO: 20631 - RNA, 21 nt, artificial
  Oligomer
uaaugucuuuuugccuucugg

SEQ ID NO: 20632 - RNA, 21 nt, artificial
  Oligomer
uuuccaggucaugagccauua

SEQ ID NO: 20633 - RNA, 21 nt, artificial
  Oligomer
uuugccuucuggaagaaauca

SEQ ID NO: 20634 - RNA, 21 nt, artificial
  Oligomer
auaaaagccgcgucuugucag

SEQ ID NO: 20635 - RNA, 21 nt, artificial
  Oligomer
auugauacaagcccuuguccu

SEQ ID NO: 20636 - RNA, 21 nt, artificial
  Oligomer
uuguccuugaucugaagauug

SEQ ID NO: 20637 - RNA, 21 nt, artificial
  Oligomer
ucuuccuaauuccguugcagc

SEQ ID NO: 20638 - RNA, 21 nt, artificial
  Oligomer
acugcugucugucuuaugucc

SEQ ID NO: 20639 - RNA, 21 nt, artificial
  Oligomer
ugucugucuuauguccauuug

SEQ ID NO: 20640 - RNA, 21 nt, artificial
  Oligomer
uuguuucaagacuuguugaug

SEQ ID NO: 20641 - RNA, 21 nt, artificial
  Oligomer
uuugcaaauuggcauggcagg

SEQ ID NO: 20642 - RNA, 21 nt, artificial
  Oligomer
uguuuagucacagguacacac

SEQ ID NO: 20643 - RNA, 21 nt, artificial
  Oligomer
ugucuuuuugccuucuggaag

SEQ ID NO: 20644 - RNA, 21 nt, artificial
  Oligomer
uuuucucuuuucuuggucugu

SEQ ID NO: 20645 - RNA, 21 nt, artificial
  Oligomer
uucucccaguauaucugucuc

SEQ ID NO: 20646 - RNA, 21 nt, artificial
  Oligomer
auguauuucuguggaucaaga

SEQ ID NO: 20647 - RNA, 21 nt, artificial
  Oligomer
uaucucugccucuccuaauuu

SEQ ID NO: 20648 - RNA, 21 nt, artificial
  Oligomer
agucucauugaaauaagcuug

SEQ ID NO: 20649 - RNA, 21 nt, artificial
  Oligomer
uaagagaagaaucugaucugg

SEQ ID NO: 20650 - RNA, 21 nt, artificial
  Oligomer
uuguaugggcuuuacucuuua

SEQ ID NO: 20651 - RNA, 21 nt, artificial
  Oligomer
uguucacucucuucccucucc

SEQ ID NO: 20652 - RNA, 21 nt, artificial
  Oligomer
uucuugguucuuagcaaaaca

SEQ ID NO: 20653 - RNA, 21 nt, artificial
  Oligomer
aauugguacuauuucagguug

SEQ ID NO: 20654 - RNA, 21 nt, artificial
  Oligomer
uugaucugaagauugugaagu

SEQ ID NO: 20655 - RNA, 21 nt, artificial
  Oligomer
uuacauggacaagcuugucua

SEQ ID NO: 20656 - RNA, 21 nt, artificial
  Oligomer
uuucauguauuucuguggauc

SEQ ID NO: 20657 - RNA, 21 nt, artificial
  Oligomer
aucucuuuugguucuuucaca

SEQ ID NO: 20658 - RNA, 21 nt, artificial
  Oligomer
uggucugcucauuguugccug

SEQ ID NO: 20659 - RNA, 21 nt, artificial
  Oligomer
uucugggcagauaaaaggcag

SEQ ID NO: 20660 - RNA, 21 nt, artificial
  Oligomer
uuaagcugggcuuggcccaua

SEQ ID NO: 20661 - RNA, 21 nt, artificial
  Oligomer
uaagagaauuaaagucuccuc

SEQ ID NO: 20662 - RNA, 21 nt, artificial
  Oligomer
ucuugguucuuagcaaaacac

SEQ ID NO: 20663 - RNA, 21 nt, artificial
  Oligomer
augaacacugucaaauuucuc

SEQ ID NO: 20664 - RNA, 21 nt, artificial
  Oligomer
ucccuuagugaucccaccuua

SEQ ID NO: 20665 - RNA, 21 nt, artificial
  Oligomer
ugaucugugucuuggucuucc

SEQ ID NO: 20666 - RNA, 21 nt, artificial
  Oligomer
uuccaggaagaugacauccca

SEQ ID NO: 20667 - RNA, 21 nt, artificial
  Oligomer
uucgaacuuuuaaaaacacgc

SEQ ID NO: 20668 - RNA, 21 nt, artificial
  Oligomer
uauacuuggaaugaacacugu

SEQ ID NO: 20669 - RNA, 21 nt, artificial
  Oligomer
ucaaauuucucuuugccuaag

SEQ ID NO: 20670 - RNA, 21 nt, artificial
  Oligomer
ugcacaaaacauguuagaaac

SEQ ID NO: 20671 - RNA, 21 nt, artificial
  Oligomer
auaucugucucuguaugcaag

SEQ ID NO: 20672 - RNA, 21 nt, artificial
  Oligomer
uuuccucugguugccuugagc

SEQ ID NO: 20673 - RNA, 21 nt, artificial
  Oligomer
uuccucugguugccuugagca

SEQ ID NO: 20674 - RNA, 21 nt, artificial
  Oligomer
uugcagcucuuccucucucag

SEQ ID NO: 20675 - RNA, 21 nt, artificial
  Oligomer
ugcuuguuucaagacuuguug

SEQ ID NO: 20676 - RNA, 21 nt, artificial
  Oligomer
uauugugaucucuuuugguuc

SEQ ID NO: 20677 - RNA, 21 nt, artificial
  Oligomer
uggcauuuuccuguuuauuca

SEQ ID NO: 20678 - RNA, 21 nt, artificial
  Oligomer
ucucuagagcauaguaaucac

SEQ ID NO: 20679 - RNA, 21 nt, artificial
  Oligomer
auaagcuugaaucuucagagg

SEQ ID NO: 20680 - RNA, 21 nt, artificial
  Oligomer
ucugaagugaaaagaagcagu

SEQ ID NO: 20681 - RNA, 21 nt, artificial
  Oligomer
ucuuggucuguucacucucuu

SEQ ID NO: 20682 - RNA, 21 nt, artificial
  Oligomer
auuccugugggcuuuuuguga

SEQ ID NO: 20683 - RNA, 21 nt, artificial
  Oligomer
uuggaaugaacacugucaaau

SEQ ID NO: 20684 - RNA, 21 nt, artificial
  Oligomer
aauacuacuagcucacucagg

SEQ ID NO: 20685 - RNA, 21 nt, artificial
  Oligomer
uucaaagucauuucucccagu

SEQ ID NO: 20686 - RNA, 21 nt, artificial
  Oligomer
acuuggguaucaccaaaaccc

SEQ ID NO: 20687 - RNA, 21 nt, artificial
  Oligomer
ucaauauuagcaacagcccag

SEQ ID NO: 20688 - RNA, 21 nt, artificial
  Oligomer
aucucugccucuccuaauuuc

SEQ ID NO: 20689 - RNA, 21 nt, artificial
  Oligomer
caccguuuuccuuacugaccc

SEQ ID NO: 20690 - RNA, 21 nt, artificial
  Oligomer
aagagaauuaaagucuccucu

SEQ ID NO: 20691 - RNA, 21 nt, artificial
  Oligomer
acucaugguaaugucuuuuug

SEQ ID NO: 20692 - RNA, 21 nt, artificial
  Oligomer
ucuccauuguguugguuccac

SEQ ID NO: 20693 - RNA, 21 nt, artificial
  Oligomer
uaauccaaggaauguggucug

SEQ ID NO: 20694 - RNA, 21 nt, artificial
  Oligomer
auauugcucguaacaucaggg

SEQ ID NO: 20695 - RNA, 21 nt, artificial
  Oligomer
augcgaaucauuccugugggc

SEQ ID NO: 20696 - RNA, 21 nt, artificial
  Oligomer
aaacuugugcggcccauauac

SEQ ID NO: 20697 - RNA, 21 nt, artificial
  Oligomer
uaggagucuaaucaaggcagg

SEQ ID NO: 20698 - RNA, 21 nt, artificial
  Oligomer
uugagcaaaaacaaucaucca

SEQ ID NO: 20699 - RNA, 21 nt, artificial
  Oligomer
ucuuggucuuccuaauuccgu

SEQ ID NO: 20700 - RNA, 21 nt, artificial
  Oligomer
uguuuauucaguucucuccac

SEQ ID NO: 20701 - RNA, 21 nt, artificial
  Oligomer
uuggucugcucauuguugccu

SEQ ID NO: 20702 - RNA, 21 nt, artificial
  Oligomer
aauucugggcagauaaaaggc

SEQ ID NO: 20703 - RNA, 21 nt, artificial
  Oligomer
aaaaacacgcugggcuucauc

SEQ ID NO: 20704 - RNA, 21 nt, artificial
  Oligomer
uucaucagaucuuucagguau

SEQ ID NO: 20705 - RNA, 21 nt, artificial
  Oligomer
ucuuugccuaaguauaccuca

SEQ ID NO: 20706 - RNA, 21 nt, artificial
  Oligomer
ucauucagaaccaaguuuucc

SEQ ID NO: 20707 - RNA, 21 nt, artificial
  Oligomer
uccacuauggcuuguugggug

SEQ ID NO: 20708 - RNA, 21 nt, artificial
  Oligomer
uccucaauauuagcaacagcc

SEQ ID NO: 20709 - RNA, 21 nt, artificial
  Oligomer
uucuaucucugccucuccuaa

SEQ ID NO: 20710 - RNA, 21 nt, artificial
  Oligomer
aucuggaggagguauuggucc

SEQ ID NO: 20711 - RNA, 21 nt, artificial
  Oligomer
uacaguucugugacauuaucu

SEQ ID NO: 20712 - RNA, 21 nt, artificial
  Oligomer
acauuaucuugagauuucugc

SEQ ID NO: 20713 - RNA, 21 nt, artificial
  Oligomer
ucgauaguugaauucuugguu

SEQ ID NO: 20714 - RNA, 21 nt, artificial
  Oligomer
ugauacaagcccuuguccuug

SEQ ID NO: 20715 - RNA, 21 nt, artificial
  Oligomer
uccugccaaaauacuacuagc

SEQ ID NO: 20716 - RNA, 21 nt, artificial
  Oligomer
cuugagcaaaaacaaucaucc

SEQ ID NO: 20717 - RNA, 21 nt, artificial
  Oligomer
uuggacagacuauccaucugu

SEQ ID NO: 20718 - RNA, 21 nt, artificial
  Oligomer
uuccuguuuauucaguucucu

SEQ ID NO: 20719 - RNA, 21 nt, artificial
  Oligomer
aaauacauaagucccacccag

SEQ ID NO: 20720 - RNA, 21 nt, artificial
  Oligomer
uuaagagaagaaucugaucug

SEQ ID NO: 20721 - RNA, 21 nt, artificial
  Oligomer
agaauuaaagucuccucuugg

SEQ ID NO: 20722 - RNA, 21 nt, artificial
  Oligomer
uuaaagucuccucuuggcaua

SEQ ID NO: 20723 - RNA, 21 nt, artificial
  Oligomer
aucacaaagagaauguuacuc

SEQ ID NO: 20724 - RNA, 21 nt, artificial
  Oligomer
auuuauaagaguugcgaggcc

SEQ ID NO: 20725 - RNA, 21 nt, artificial
  Oligomer
aaaggugaagauaaaagccgc

SEQ ID NO: 20726 - RNA, 21 nt, artificial
  Oligomer
ucugcauaacaccaucauacu

SEQ ID NO: 20727 - RNA, 21 nt, artificial
  Oligomer
cuuagguucuggguaaccgug

SEQ ID NO: 20728 - RNA, 21 nt, artificial
  Oligomer
augagcaggucaaauuuaugu

SEQ ID NO: 20729 - RNA, 21 nt, artificial
  Oligomer
guggaugcgaaucauuccugu

SEQ ID NO: 20730 - RNA, 21 nt, artificial
  Oligomer
uuccugugggcuuuuugugau

SEQ ID NO: 20731 - RNA, 21 nt, artificial
  Oligomer
auaaaggaacauuuuuguggc

SEQ ID NO: 20732 - RNA, 21 nt, artificial
  Oligomer
auuuuuguggcucaggcuccc

SEQ ID NO: 20733 - RNA, 21 nt, artificial
  Oligomer
aucuguaggcuaaguaagccc

SEQ ID NO: 20734 - RNA, 21 nt, artificial
  Oligomer
ucacuagucaguucuucaaga

SEQ ID NO: 20735 - RNA, 21 nt, artificial
  Oligomer
acaagcucuggcauuuuccug

SEQ ID NO: 20736 - RNA, 21 nt, artificial
  Oligomer
acagguacacacaaaauucag

SEQ ID NO: 20737 - RNA, 21 nt, artificial
  Oligomer
uuuuccagaaauugagagguc

SEQ ID NO: 20738 - RNA, 21 nt, artificial
  Oligomer
uuggcccauaagugugcucug

SEQ ID NO: 20739 - RNA, 21 nt, artificial
  Oligomer
uauuccacuuagagggagucc

SEQ ID NO: 20740 - RNA, 21 nt, artificial
  Oligomer
cuuauuacucaugguaauguc

SEQ ID NO: 20741 - RNA, 21 nt, artificial
  Oligomer
ucaaaaagguugcccaggaac

SEQ ID NO: 20742 - RNA, 21 nt, artificial
  Oligomer
aagagaauguuacucaguccc

SEQ ID NO: 20743 - RNA, 21 nt, artificial
  Oligomer
guuuucaaagucauuucuccc

SEQ ID NO: 20744 - RNA, 21 nt, artificial
  Oligomer
ugucucuguaugcaaguuucc

SEQ ID NO: 20745 - RNA, 21 nt, artificial
  Oligomer
uggucuuccuaauuccguugc

SEQ ID NO: 20746 - RNA, 21 nt, artificial
  Oligomer
ccauucaucccauuaucaagg

SEQ ID NO: 20747 - RNA, 21 nt, artificial
  Oligomer
ucuguugcuuguuucaagacu

SEQ ID NO: 20748 - RNA, 21 nt, artificial
  Oligomer
agagaaacaggguucacaagc

SEQ ID NO: 20749 - RNA, 21 nt, artificial
  Oligomer
ucuaucucugccucuccuaau

SEQ ID NO: 20750 - RNA, 21 nt, artificial
  Oligomer
ugacagagggaugagaacucc

SEQ ID NO: 20751 - RNA, 21 nt, artificial
  Oligomer
ucaugguaaugucuuuuugcc

SEQ ID NO: 20752 - RNA, 21 nt, artificial
  Oligomer
cucuuuucuuggucuguucac

SEQ ID NO: 20753 - RNA, 21 nt, artificial
  Oligomer
agaauuagacagaaaaccauc

SEQ ID NO: 20754 - RNA, 21 nt, artificial
  Oligomer
ucauauugcucguaacaucag

SEQ ID NO: 20755 - RNA, 21 nt, artificial
  Oligomer
uucagguugacugaaguuagc

SEQ ID NO: 20756 - RNA, 21 nt, artificial
  Oligomer
uccaacuguccgaaucaaaac

SEQ ID NO: 20757 - RNA, 21 nt, artificial
  Oligomer
cucuuugccuaaguauaccuc

SEQ ID NO: 20758 - RNA, 21 nt, artificial
  Oligomer
uuugccuaaguauaccucauu

SEQ ID NO: 20759 - RNA, 21 nt, artificial
  Oligomer
aacauguuagaaacuagccag

SEQ ID NO: 20760 - RNA, 21 nt, artificial
  Oligomer
aaauacuacuagcucacucag

SEQ ID NO: 20761 - RNA, 21 nt, artificial
  Oligomer
auuucucccaguauaucuguc

SEQ ID NO: 20762 - RNA, 21 nt, artificial
  Oligomer
uaucugucucuguaugcaagu

SEQ ID NO: 20763 - RNA, 21 nt, artificial
  Oligomer
ucugugucuuggucuuccuaa

SEQ ID NO: 20764 - RNA, 21 nt, artificial
  Oligomer
cucacuagucaguucuucaag

SEQ ID NO: 20765 - RNA, 21 nt, artificial
  Oligomer
uucaagagaaacaggguucac

SEQ ID NO: 20766 - RNA, 21 nt, artificial
  Oligomer
cuggcauuuuccuguuuauuc

SEQ ID NO: 20767 - RNA, 21 nt, artificial
  Oligomer
uuuauucaguucucuccacua

SEQ ID NO: 20768 - RNA, 21 nt, artificial
  Oligomer
uuauucaguucucuccacuau

SEQ ID NO: 20769 - RNA, 21 nt, artificial
  Oligomer
uccaggucaugagccauuaag

SEQ ID NO: 20770 - RNA, 21 nt, artificial
  Oligomer
uccauuuccauagaauuagac

SEQ ID NO: 20771 - RNA, 21 nt, artificial
  Oligomer
uccagaauacagaagaugguc

SEQ ID NO: 20772 - RNA, 21 nt, artificial
  Oligomer
auacagaagauggucauauug

SEQ ID NO: 20773 - RNA, 21 nt, artificial
  Oligomer
aagcugauggaaacgucguac

SEQ ID NO: 20774 - RNA, 21 nt, artificial
  Oligomer
uauagaugagcaggucaaauu

SEQ ID NO: 20775 - RNA, 21 nt, artificial
  Oligomer
uguuagaaacuagccaggugc

SEQ ID NO: 20776 - RNA, 21 nt, artificial
  Oligomer
ucugucucuguaugcaaguuu

SEQ ID NO: 20777 - RNA, 21 nt, artificial
  Oligomer
uuccauucaucccauuaucaa

SEQ ID NO: 20778 - RNA, 21 nt, artificial
  Oligomer
uguugcuuguuucaagacuug

SEQ ID NO: 20779 - RNA, 21 nt, artificial
  Oligomer
ucucuccacuauggcuuguug

SEQ ID NO: 20780 - RNA, 21 nt, artificial
  Oligomer
uuuagucacagguacacacaa

SEQ ID NO: 20781 - RNA, 21 nt, artificial
  Oligomer
ucugaucuggaggagguauug

SEQ ID NO: 20782 - RNA, 21 nt, artificial
  Oligomer
aggaacuuacaaaggaaaggg

SEQ ID NO: 20783 - RNA, 21 nt, artificial
  Oligomer
cuuagcaaaacacucaucuuc

SEQ ID NO: 20784 - RNA, 21 nt, artificial
  Oligomer
auagaugagcaggucaaauuu

SEQ ID NO: 20785 - RNA, 21 nt, artificial
  Oligomer
uccugugggcuuuuugugaug

SEQ ID NO: 20786 - RNA, 21 nt, artificial
  Oligomer
augauacauugauacaagccc

SEQ ID NO: 20787 - RNA, 21 nt, artificial
  Oligomer
acacugucaaauuucucuuug

SEQ ID NO: 20788 - RNA, 21 nt, artificial
  Oligomer
uauuacauggacaagcuuguc

SEQ ID NO: 20789 - RNA, 21 nt, artificial
  Oligomer
cuuagagccagguuuucaaag

SEQ ID NO: 20790 - RNA, 21 nt, artificial
  Oligomer
uuagagccagguuuucaaagu

SEQ ID NO: 20791 - RNA, 21 nt, artificial
  Oligomer
uuucucccaguauaucugucu

SEQ ID NO: 20792 - RNA, 21 nt, artificial
  Oligomer
uauaucugucucuguaugcaa

SEQ ID NO: 20793 - RNA, 21 nt, artificial
  Oligomer
aucccauuaucaaggugaugg

SEQ ID NO: 20794 - RNA, 21 nt, artificial
  Oligomer
augacaucccaauaacuuggg

SEQ ID NO: 20795 - RNA, 21 nt, artificial
  Oligomer
uugagaguuugcaaauuggca

SEQ ID NO: 20796 - RNA, 21 nt, artificial
  Oligomer
uaacuuggguaucaccaaaac

SEQ ID NO: 20797 - RNA, 21 nt, artificial
  Oligomer
uuuggacagacuauccaucug

SEQ ID NO: 20798 - RNA, 21 nt, artificial
  Oligomer
aguggcuccagguucuaucuc

SEQ ID NO: 20799 - RNA, 21 nt, artificial
  Oligomer
aauaagcuugaaucuucagag

SEQ ID NO: 20800 - RNA, 21 nt, artificial
  Oligomer
uuagucacagguacacacaaa

SEQ ID NO: 20801 - RNA, 21 nt, artificial
  Oligomer
augguaaugucuuuuugccuu

SEQ ID NO: 20802 - RNA, 21 nt, artificial
  Oligomer
ucacaaagagaauguuacuca

SEQ ID NO: 20803 - RNA, 21 nt, artificial
  Oligomer
ucagaucuuucagguauaugg

SEQ ID NO: 20804 - RNA, 21 nt, artificial
  Oligomer
aauguuacucagucccauagu

SEQ ID NO: 20805 - RNA, 21 nt, artificial
  Oligomer
ucuucuucuuccauuuccaua

SEQ ID NO: 20806 - RNA, 21 nt, artificial
  Oligomer
cuugagauuucugcauaacac

SEQ ID NO: 20807 - RNA, 21 nt, artificial
  Oligomer
uaacaccaucauacucgauag

SEQ ID NO: 20808 - RNA, 21 nt, artificial
  Oligomer
acucgauaguugaauucuugg

SEQ ID NO: 20809 - RNA, 21 nt, artificial
  Oligomer
cuugguucuuagcaaaacacu

SEQ ID NO: 20810 - RNA, 21 nt, artificial
  Oligomer
uuagcaagcacugacaguuca

SEQ ID NO: 20811 - RNA, 21 nt, artificial
  Oligomer
uaccucauucagaaccaaguu

SEQ ID NO: 20812 - RNA, 21 nt, artificial
  Oligomer
uuuuccugguccugccaaaau

SEQ ID NO: 20813 - RNA, 21 nt, artificial
  Oligomer
aaacaugggaauauuacaugg

SEQ ID NO: 20814 - RNA, 21 nt, artificial
  Oligomer
uguccauuuggacagacuauc

SEQ ID NO: 20815 - RNA, 21 nt, artificial
  Oligomer
aguucuucaagagaaacaggg

SEQ ID NO: 20816 - RNA, 21 nt, artificial
  Oligomer
agguuggucugcucauuguug

SEQ ID NO: 20817 - RNA, 21 nt, artificial
  Oligomer
auuguugccuguacccuaggc

SEQ ID NO: 20818 - RNA, 21 nt, artificial
  Oligomer
auacauaagucccacccagac

SEQ ID NO: 20819 - RNA, 21 nt, artificial
  Oligomer
uugccuucuggaagaaaucaa

SEQ ID NO: 20820 - RNA, 21 nt, artificial
  Oligomer
uuacaaaggaaaggguagaaa

SEQ ID NO: 20821 - RNA, 21 nt, artificial
  Oligomer
aucagaucuuucagguauaug

SEQ ID NO: 20822 - RNA, 21 nt, artificial
  Oligomer
auguuacucagucccauagug

SEQ ID NO: 20823 - RNA, 21 nt, artificial
  Oligomer
ucacucucuucccucuccauu

SEQ ID NO: 20824 - RNA, 21 nt, artificial
  Oligomer
uccacauuuauaagaguugcg

SEQ ID NO: 20825 - RNA, 21 nt, artificial
  Oligomer
auaacuguuggaaguacagcu

SEQ ID NO: 20826 - RNA, 21 nt, artificial
  Oligomer
agauuucugcauaacaccauc

SEQ ID NO: 20827 - RNA, 21 nt, artificial
  Oligomer
cauugauacaagcccuugucc

SEQ ID NO: 20828 - RNA, 21 nt, artificial
  Oligomer
uccuugaucugaagauuguga

SEQ ID NO: 20829 - RNA, 21 nt, artificial
  Oligomer
gugaagucucaggguccaacu

SEQ ID NO: 20830 - RNA, 21 nt, artificial
  Oligomer
auacuuggaaugaacacuguc

SEQ ID NO: 20831 - RNA, 21 nt, artificial
  Oligomer
caaaauacuacuagcucacuc

SEQ ID NO: 20832 - RNA, 21 nt, artificial
  Oligomer
ucauuucucccaguauaucug

SEQ ID NO: 20833 - RNA, 21 nt, artificial
  Oligomer
cucaaauuugcuagcccuaug

SEQ ID NO: 20834 - RNA, 21 nt, artificial
  Oligomer
uugguuuugagaguuugcaaa

SEQ ID NO: 20835 - RNA, 21 nt, artificial
  Oligomer
auugugaucucuuuugguucu

SEQ ID NO: 20836 - RNA, 21 nt, artificial
  Oligomer
ucaguucuucaagagaaacag

SEQ ID NO: 20837 - RNA, 21 nt, artificial
  Oligomer
uaggccaccguuuuccuuacu

SEQ ID NO: 20838 - RNA, 21 nt, artificial
  Oligomer
aggagguaguuguuuagucac

SEQ ID NO: 20839 - RNA, 21 nt, artificial
  Oligomer
auuaaagucuccucuuggcau

SEQ ID NO: 20840 - RNA, 21 nt, artificial
  Oligomer
aaaugaauacuuguaugggcu

SEQ ID NO: 20841 - RNA, 21 nt, artificial
  Oligomer
acuuguaugggcuuuacucuu

SEQ ID NO: 20842 - RNA, 21 nt, artificial
  Oligomer
uuuugucgcaugaagaugucu

SEQ ID NO: 20843 - RNA, 21 nt, artificial
  Oligomer
uuauaagaguugcgaggccgc

SEQ ID NO: 20844 - RNA, 21 nt, artificial
  Oligomer
uacagcuguaauccaaggaau

SEQ ID NO: 20845 - RNA, 21 nt, artificial
  Oligomer
augaaacagacaagcugaugg

SEQ ID NO: 20846 - RNA, 21 nt, artificial
  Oligomer
uucugugacauuaucuugaga

SEQ ID NO: 20847 - RNA, 21 nt, artificial
  Oligomer
uuucugcauaacaccaucaua

SEQ ID NO: 20848 - RNA, 21 nt, artificial
  Oligomer
aguugaauucuugguucuuag

SEQ ID NO: 20849 - RNA, 21 nt, artificial
  Oligomer
ugguucuuagcaaaacacuca

SEQ ID NO: 20850 - RNA, 21 nt, artificial
  Oligomer
ucuuagguucuggguaaccgu

SEQ ID NO: 20851 - RNA, 21 nt, artificial
  Oligomer
ugcgaaucauuccugugggcu

SEQ ID NO: 20852 - RNA, 21 nt, artificial
  Oligomer
ugaagauugugaagucucagg

SEQ ID NO: 20853 - RNA, 21 nt, artificial
  Oligomer
uagcucacucaggcuuugguu

SEQ ID NO: 20854 - RNA, 21 nt, artificial
  Oligomer
gucauuucucccaguauaucu

SEQ ID NO: 20855 - RNA, 21 nt, artificial
  Oligomer
uaggacaucuguaggcuaagu

SEQ ID NO: 20856 - RNA, 21 nt, artificial
  Oligomer
guuuauucaguucucuccacu

SEQ ID NO: 20857 - RNA, 21 nt, artificial
  Oligomer
cugcucauuguugccuguacc

SEQ ID NO: 20858 - RNA, 21 nt, artificial
  Oligomer
uacagggaggcuauuccacuu

SEQ ID NO: 20859 - RNA, 21 nt, artificial
  Oligomer
gucuguucacucucuucccuc

SEQ ID NO: 20860 - RNA, 21 nt, artificial
  Oligomer
ucuucccucuccauuguguug

SEQ ID NO: 20861 - RNA, 21 nt, artificial
  Oligomer
acauuuauaagaguugcgagg

SEQ ID NO: 20862 - RNA, 21 nt, artificial
  Oligomer
aaguacagcuguaauccaagg

SEQ ID NO: 20863 - RNA, 21 nt, artificial
  Oligomer
ucguacaguucugugacauua

SEQ ID NO: 20864 - RNA, 21 nt, artificial
  Oligomer
ucuugagauuucugcauaaca

SEQ ID NO: 20865 - RNA, 21 nt, artificial
  Oligomer
gaugcgaaucauuccuguggg

SEQ ID NO: 20866 - RNA, 21 nt, artificial
  Oligomer
uacuuggaaugaacacuguca

SEQ ID NO: 20867 - RNA, 21 nt, artificial
  Oligomer
ugguccugccaaaauacuacu

SEQ ID NO: 20868 - RNA, 21 nt, artificial
  Oligomer
auuacauggacaagcuugucu

SEQ ID NO: 20869 - RNA, 21 nt, artificial
  Oligomer
acauggacaagcuugucuagc

SEQ ID NO: 20870 - RNA, 21 nt, artificial
  Oligomer
auggcagucuauaacccuuga

SEQ ID NO: 20871 - RNA, 21 nt, artificial
  Oligomer
cauuuuuguggcucaggcucc

SEQ ID NO: 20872 - RNA, 21 nt, artificial
  Oligomer
auccaacucaaauuugcuagc

SEQ ID NO: 20873 - RNA, 21 nt, artificial
  Oligomer
auuugcuagcccuaugcuggg

SEQ ID NO: 20874 - RNA, 21 nt, artificial
  Oligomer
ugugucuuggucuuccuaauu

SEQ ID NO: 20875 - RNA, 21 nt, artificial
  Oligomer
gugucuuggucuuccuaauuc

SEQ ID NO: 20876 - RNA, 21 nt, artificial
  Oligomer
aauuccguugcagcucuuccu

SEQ ID NO: 20877 - RNA, 21 nt, artificial
  Oligomer
aguggaaaguccuaagccucc

SEQ ID NO: 20878 - RNA, 21 nt, artificial
  Oligomer
ccuuccauucaucccauuauc

SEQ ID NO: 20879 - RNA, 21 nt, artificial
  Oligomer
aacugcugucugucuuauguc

SEQ ID NO: 20880 - RNA, 21 nt, artificial
  Oligomer
ugcagucucauugaaauaagc

SEQ ID NO: 20881 - RNA, 21 nt, artificial
  Oligomer
uaaagucuccucuuggcauac

SEQ ID NO: 20882 - RNA, 21 nt, artificial
  Oligomer
uacuuguaugggcuuuacucu

SEQ ID NO: 20883 - RNA, 21 nt, artificial
  Oligomer
ugggcuucaucagaucuuuca

SEQ ID NO: 20884 - RNA, 21 nt, artificial
  Oligomer
guucacucucuucccucucca

SEQ ID NO: 20885 - RNA, 21 nt, artificial
  Oligomer
aauuagacagaaaaccaucac

SEQ ID NO: 20886 - RNA, 21 nt, artificial
  Oligomer
agaagauggucauauugcucg

SEQ ID NO: 20887 - RNA, 21 nt, artificial
  Oligomer
cauauugcucguaacaucagg

SEQ ID NO: 20888 - RNA, 21 nt, artificial
  Oligomer
aaugaaacagacaagcugaug

SEQ ID NO: 20889 - RNA, 21 nt, artificial
  Oligomer
guucuuagcaaaacacucauc

SEQ ID NO: 20890 - RNA, 21 nt, artificial
  Oligomer
uucuggguaaccguguauaga

SEQ ID NO: 20891 - RNA, 21 nt, artificial
  Oligomer
ugaaguuagcaagcacugaca

SEQ ID NO: 20892 - RNA, 21 nt, artificial
  Oligomer
ugugaagucucaggguccaac

SEQ ID NO: 20893 - RNA, 21 nt, artificial
  Oligomer
uccgaaucaaaacuugugcgg

SEQ ID NO: 20894 - RNA, 21 nt, artificial
  Oligomer
aacuugugcggcccauauacu

SEQ ID NO: 20895 - RNA, 21 nt, artificial
  Oligomer
uggaaugaacacugucaaauu

SEQ ID NO: 20896 - RNA, 21 nt, artificial
  Oligomer
accaaguuuuccugguccugc

SEQ ID NO: 20897 - RNA, 21 nt, artificial
  Oligomer
uccugguccugccaaaauacu

SEQ ID NO: 20898 - RNA, 21 nt, artificial
  Oligomer
auacuacuagcucacucaggc

SEQ ID NO: 20899 - RNA, 21 nt, artificial
  Oligomer
agguuuucaaagucauuucuc

SEQ ID NO: 20900 - RNA, 21 nt, artificial
  Oligomer
aaucauccaacucaaauuugc

SEQ ID NO: 20901 - RNA, 21 nt, artificial
  Oligomer
cauccaacucaaauuugcuag

SEQ ID NO: 20902 - RNA, 21 nt, artificial
  Oligomer
uccauucaucccauuaucaag

SEQ ID NO: 20903 - RNA, 21 nt, artificial
  Oligomer
gauagaaguggcuccagguuc

SEQ ID NO: 20904 - RNA, 21 nt, artificial
  Oligomer
cucugccucuccuaauuuccc

SEQ ID NO: 20905 - RNA, 21 nt, artificial
  Oligomer
uagguuggucugcucauuguu

SEQ ID NO: 20906 - RNA, 21 nt, artificial
  Oligomer
auuuuauuuccaggucaugag

SEQ ID NO: 20907 - RNA, 21 nt, artificial
  Oligomer
uuuugccuucuggaagaaauc

SEQ ID NO: 20908 - RNA, 21 nt, artificial
  Oligomer
ucuggaagaaaucaaaaaggu

SEQ ID NO: 20909 - RNA, 21 nt, artificial
  Oligomer
aaaaugaauacuuguaugggc

SEQ ID NO: 20910 - RNA, 21 nt, artificial
  Oligomer
auuagacagaaaaccaucaca

SEQ ID NO: 20911 - RNA, 21 nt, artificial
  Oligomer
auucuugguucuuagcaaaac

SEQ ID NO: 20912 - RNA, 21 nt, artificial
  Oligomer
caaaacacucaucuucuuagg

SEQ ID NO: 20913 - RNA, 21 nt, artificial
  Oligomer
ugguggaugcgaaucauuccu

SEQ ID NO: 20914 - RNA, 21 nt, artificial
  Oligomer
cuugugcggcccauauacuug

SEQ ID NO: 20915 - RNA, 21 nt, artificial
  Oligomer
ugaacacugucaaauuucucu

SEQ ID NO: 20916 - RNA, 21 nt, artificial
  Oligomer
uaaguauaccucauucagaac

SEQ ID NO: 20917 - RNA, 21 nt, artificial
  Oligomer
agaaccaaguuuuccuggucc

SEQ ID NO: 20918 - RNA, 21 nt, artificial
  Oligomer
ugccaaaauacuacuagcuca

SEQ ID NO: 20919 - RNA, 21 nt, artificial
  Oligomer
aacugugcugcacaaaacaug

SEQ ID NO: 20920 - RNA, 21 nt, artificial
  Oligomer
acauguuagaaacuagccagg

SEQ ID NO: 20921 - RNA, 21 nt, artificial
  Oligomer
cuaggagucuaaucaaggcag

SEQ ID NO: 20922 - RNA, 21 nt, artificial
  Oligomer
uauaacccuugaggguuuaca

SEQ ID NO: 20923 - RNA, 21 nt, artificial
  Oligomer
acuagcucacucaggcuuugg

SEQ ID NO: 20924 - RNA, 21 nt, artificial
  Oligomer
uagagccagguuuucaaaguc

SEQ ID NO: 20925 - RNA, 21 nt, artificial
  Oligomer
ucucccaguauaucugucucu

SEQ ID NO: 20926 - RNA, 21 nt, artificial
  Oligomer
cucccaguauaucugucucug

SEQ ID NO: 20927 - RNA, 21 nt, artificial
  Oligomer
cugucucuguaugcaaguuuc

SEQ ID NO: 20928 - RNA, 21 nt, artificial
  Oligomer
cuguaugcaaguuuccucugg

SEQ ID NO: 20929 - RNA, 21 nt, artificial
  Oligomer
ugucuuauguccauuuggaca

SEQ ID NO: 20930 - RNA, 21 nt, artificial
  Oligomer
uuauguccauuuggacagacu

SEQ ID NO: 20931 - RNA, 21 nt, artificial
  Oligomer
guccauuuggacagacuaucc

SEQ ID NO: 20932 - RNA, 21 nt, artificial
  Oligomer
uugugaucucuuuugguucuu

SEQ ID NO: 20933 - RNA, 21 nt, artificial
  Oligomer
cuguuuauucaguucucucca

SEQ ID NO: 20934 - RNA, 21 nt, artificial
  Oligomer
aaauuuagguuggucugcuca

SEQ ID NO: 20935 - RNA, 21 nt, artificial
  Oligomer
auuuagguuggucugcucauu

SEQ ID NO: 20936 - RNA, 21 nt, artificial
  Oligomer
uuccuuacugacccugacaga

SEQ ID NO: 20937 - RNA, 21 nt, artificial
  Oligomer
acauaagucccacccagacug

SEQ ID NO: 20938 - RNA, 21 nt, artificial
  Oligomer
uagaauucugggcagauaaaa

SEQ ID NO: 20939 - RNA, 21 nt, artificial
  Oligomer
uacaaaggaaaggguagaaaa

SEQ ID NO: 20940 - RNA, 21 nt, artificial
  Oligomer
aauacuuguaugggcuuuacu

SEQ ID NO: 20941 - RNA, 21 nt, artificial
  Oligomer
ucucuucccucuccauugugu

SEQ ID NO: 20942 - RNA, 21 nt, artificial
  Oligomer
cuucccucuccauuguguugg

SEQ ID NO: 20943 - RNA, 21 nt, artificial
  Oligomer
auaagaguugcgaggccgcuu

SEQ ID NO: 20944 - RNA, 21 nt, artificial
  Oligomer
uucuucuucuuccauuuccau

SEQ ID NO: 20945 - RNA, 21 nt, artificial
  Oligomer
ugucaguuuccagaauacaga

SEQ ID NO: 20946 - RNA, 21 nt, artificial
  Oligomer
gucauauugcucguaacauca

SEQ ID NO: 20947 - RNA, 21 nt, artificial
  Oligomer
ugcucguaacaucagggaaug

SEQ ID NO: 20948 - RNA, 21 nt, artificial
  Oligomer
caguucugugacauuaucuug

SEQ ID NO: 20949 - RNA, 21 nt, artificial
  Oligomer
ucugugacauuaucuugagau

SEQ ID NO: 20950 - RNA, 21 nt, artificial
  Oligomer
cuggguaaccguguauagaug

SEQ ID NO: 20951 - RNA, 21 nt, artificial
  Oligomer
uugacugaaguuagcaagcac

SEQ ID NO: 20952 - RNA, 21 nt, artificial
  Oligomer
aagcacugacaguucagaauu

SEQ ID NO: 20953 - RNA, 21 nt, artificial
  Oligomer
aucugaagauugugaagucuc

SEQ ID NO: 20954 - RNA, 21 nt, artificial
  Oligomer
aacuguccgaaucaaaacuug

SEQ ID NO: 20955 - RNA, 21 nt, artificial
  Oligomer
acuugugcggcccauauacuu

SEQ ID NO: 20956 - RNA, 21 nt, artificial
  Oligomer
ugucaaauuucucuuugccua

SEQ ID NO: 20957 - RNA, 21 nt, artificial
  Oligomer
cauggcagucuauaacccuug

SEQ ID NO: 20958 - RNA, 21 nt, artificial
  Oligomer
aauuugcuagcccuaugcugg

SEQ ID NO: 20959 - RNA, 21 nt, artificial
  Oligomer
aguccuaagccuccuuccauu

SEQ ID NO: 20960 - RNA, 21 nt, artificial
  Oligomer
uccuaagccuccuuccauuca

SEQ ID NO: 20961 - RNA, 21 nt, artificial
  Oligomer
agaguuugcaaauuggcaugg

SEQ ID NO: 20962 - RNA, 21 nt, artificial
  Oligomer
aaguggcuccagguucuaucu

SEQ ID NO: 20963 - RNA, 21 nt, artificial
  Oligomer
uagagcauaguaaucacacua

SEQ ID NO: 20964 - RNA, 21 nt, artificial
  Oligomer
guacauagaucucuauguuuc

SEQ ID NO: 20965 - RNA, 21 nt, artificial
  Oligomer
agguacacacaaaauucagug

SEQ ID NO: 20966 - RNA, 21 nt, artificial
  Oligomer
uggaggagguauugguccuaa

SEQ ID NO: 20967 - RNA, 21 nt, artificial
  Oligomer
aaggccaucacaaagagaaug

SEQ ID NO: 20968 - RNA, 21 nt, artificial
  Oligomer
aaagucuccucuuggcauacg

SEQ ID NO: 20969 - RNA, 21 nt, artificial
  Oligomer
cucaugguaaugucuuuuugc

SEQ ID NO: 20970 - RNA, 21 nt, artificial
  Oligomer
ugguaaugucuuuuugccuuc

SEQ ID NO: 20971 - RNA, 21 nt, artificial
  Oligomer
aaggaaaggguagaaaaaaug

SEQ ID NO: 20972 - RNA, 21 nt, artificial
  Oligomer
ucgaacuuuuaaaaacacgcu

SEQ ID NO: 20973 - RNA, 21 nt, artificial
  Oligomer
acuuuuaaaaacacgcugggc

SEQ ID NO: 20974 - RNA, 21 nt, artificial
  Oligomer
ucuguucacucucuucccucu

SEQ ID NO: 20975 - RNA, 21 nt, artificial
  Oligomer
uaacaucagggaaugaaacag

SEQ ID NO: 20976 - RNA, 21 nt, artificial
  Oligomer
ucuggguaaccguguauagau

SEQ ID NO: 20977 - RNA, 21 nt, artificial
  Oligomer
uagaugagcaggucaaauuua

SEQ ID NO: 20978 - RNA, 21 nt, artificial
  Oligomer
agaaauugguacuauuucagg

SEQ ID NO: 20979 - RNA, 21 nt, artificial
  Oligomer
acugugcugcacaaaacaugu

SEQ ID NO: 20980 - RNA, 21 nt, artificial
  Oligomer
acauuuuuguggcucaggcuc

SEQ ID NO: 20981 - RNA, 21 nt, artificial
  Oligomer
cuuagugaucccaccuuagag

SEQ ID NO: 20982 - RNA, 21 nt, artificial
  Oligomer
agucauuucucccaguauauc

SEQ ID NO: 20983 - RNA, 21 nt, artificial
  Oligomer
ugcaaguuuccucugguugcc

SEQ ID NO: 20984 - RNA, 21 nt, artificial
  Oligomer
guccuaagccuccuuccauuc

SEQ ID NO: 20985 - RNA, 21 nt, artificial
  Oligomer
cuaagccuccuuccauucauc

SEQ ID NO: 20986 - RNA, 21 nt, artificial
  Oligomer
guuuugagaguuugcaaauug

SEQ ID NO: 20987 - RNA, 21 nt, artificial
  Oligomer
ucugucuuauguccauuugga

SEQ ID NO: 20988 - RNA, 21 nt, artificial
  Oligomer
ucuuauguccauuuggacaga

SEQ ID NO: 20989 - RNA, 21 nt, artificial
  Oligomer
agacuauccaucuguugcuug

SEQ ID NO: 20990 - RNA, 21 nt, artificial
  Oligomer
aucucacuagucaguucuuca

SEQ ID NO: 20991 - RNA, 21 nt, artificial
  Oligomer
cugcagucucauugaaauaag

SEQ ID NO: 20992 - RNA, 21 nt, artificial
  Oligomer
uacauaagucccacccagacu

SEQ ID NO: 20993 - RNA, 21 nt, artificial
  Oligomer
gagguaguuguuuagucacag

SEQ ID NO: 20994 - RNA, 23 nt, artificial
  Oligomer
gcuuauuucaaugagacugcaga

SEQ ID NO: 20995 - RNA, 23 nt, artificial
  Oligomer
ccuuuauuuuauguaaacccuca

SEQ ID NO: 20996 - RNA, 23 nt, artificial
  Oligomer
agagaaaaaauccauauaccuga

SEQ ID NO: 20997 - RNA, 23 nt, artificial
  Oligomer
gguuuuggugauacccaaguuau

SEQ ID NO: 20998 - RNA, 23 nt, artificial
  Oligomer
ccaagaaaagagaaaaaauccau

SEQ ID NO: 20999 - RNA, 23 nt, artificial
  Oligomer
ggugcugcuccucugaagauuca

SEQ ID NO: 21000 - RNA, 23 nt, artificial
  Oligomer
gagaaaaaauccauauaccugaa

SEQ ID NO: 21001 - RNA, 23 nt, artificial
  Oligomer
ggugauacccaaguuauugggau

SEQ ID NO: 21002 - RNA, 23 nt, artificial
  Oligomer
caagauaaugucacagaacugua

SEQ ID NO: 21003 - RNA, 23 nt, artificial
  Oligomer
aaguuuugauucggacaguugga

SEQ ID NO: 21004 - RNA, 23 nt, artificial
  Oligomer
ccauguaauauucccauguuuuu

SEQ ID NO: 21005 - RNA, 23 nt, artificial
  Oligomer
cuuaugggccaagcccagcuuaa

SEQ ID NO: 21006 - RNA, 23 nt, artificial
  Oligomer
cugaagauucaagcuuauuucaa

SEQ ID NO: 21007 - RNA, 23 nt, artificial
  Oligomer
gccagagcuugugaacccuguuu

SEQ ID NO: 21008 - RNA, 23 nt, artificial
  Oligomer
agcuuaauggcucaugaccugga

SEQ ID NO: 21009 - RNA, 23 nt, artificial
  Oligomer
caacuaucgaguaugaugguguu

SEQ ID NO: 21010 - RNA, 23 nt, artificial
  Oligomer
uguuuuugcucaaggcaaccaga

SEQ ID NO: 21011 - RNA, 23 nt, artificial
  Oligomer
ccuguuucucuugaagaacugac

SEQ ID NO: 21012 - RNA, 23 nt, artificial
  Oligomer
guaacuccagcucugcuccguau

SEQ ID NO: 21013 - RNA, 23 nt, artificial
  Oligomer
ugaccuggaaauaaaauuuagga

SEQ ID NO: 21014 - RNA, 23 nt, artificial
  Oligomer
guaguauuuuggcaggaccagga

SEQ ID NO: 21015 - RNA, 23 nt, artificial
  Oligomer
cuugugaacccuguuucucuuga

SEQ ID NO: 21016 - RNA, 23 nt, artificial
  Oligomer
cagaccugccaugccaauuugca

SEQ ID NO: 21017 - RNA, 23 nt, artificial
  Oligomer
ugaauaaacaggaaaaugccaga

SEQ ID NO: 21018 - RNA, 23 nt, artificial
  Oligomer
aaauagaccucucaauuucugga

SEQ ID NO: 21019 - RNA, 23 nt, artificial
  Oligomer
ccaauaccuccuccagaucagau

SEQ ID NO: 21020 - RNA, 23 nt, artificial
  Oligomer
aagaagaagaagcggccucgcaa

SEQ ID NO: 21021 - RNA, 23 nt, artificial
  Oligomer
ccaacaguuauuauaugugugau

SEQ ID NO: 21022 - RNA, 23 nt, artificial
  Oligomer
cuuccaacaguuauuauaugugu

SEQ ID NO: 21023 - RNA, 23 nt, artificial
  Oligomer
gauaaugucacagaacuguacga

SEQ ID NO: 21024 - RNA, 23 nt, artificial
  Oligomer
cugucagugcuugcuaacuucag

SEQ ID NO: 21025 - RNA, 23 nt, artificial
  Oligomer
ucauucccugauguuacgagcaa

SEQ ID NO: 21026 - RNA, 23 nt, artificial
  Oligomer
gcuugucuguuucauucccugau

SEQ ID NO: 21027 - RNA, 23 nt, artificial
  Oligomer
ccuccuccagaucagauucuucu

SEQ ID NO: 21028 - RNA, 23 nt, artificial
  Oligomer
agccaucaccuugauaaugggau

SEQ ID NO: 21029 - RNA, 23 nt, artificial
  Oligomer
ggaaacugacaagacgcggcuuu

SEQ ID NO: 21030 - RNA, 23 nt, artificial
  Oligomer
caaaaagcccacaggaaugauuc

SEQ ID NO: 21031 - RNA, 23 nt, artificial
  Oligomer
ccuugauuagacuccuagcaccu

SEQ ID NO: 21032 - RNA, 23 nt, artificial
  Oligomer
acuuaugggccaagcccagcuua

SEQ ID NO: 21033 - RNA, 23 nt, artificial
  Oligomer
guacgacguuuccaucagcuugu

SEQ ID NO: 21034 - RNA, 23 nt, artificial
  Oligomer
ucacaaucuucagaucaaggaca

SEQ ID NO: 21035 - RNA, 23 nt, artificial
  Oligomer
cauguuuugugcagcacaguuuu

SEQ ID NO: 21036 - RNA, 23 nt, artificial
  Oligomer
caaauuugaguuggaugauuguu

SEQ ID NO: 21037 - RNA, 23 nt, artificial
  Oligomer
gguacaggcaacaaugagcagac

SEQ ID NO: 21038 - RNA, 23 nt, artificial
  Oligomer
caguuauuauaugugugaugguu

SEQ ID NO: 21039 - RNA, 23 nt, artificial
  Oligomer
auucggacaguuggacccugaga

SEQ ID NO: 21040 - RNA, 23 nt, artificial
  Oligomer
uguuuugugcagcacaguuuuua

SEQ ID NO: 21041 - RNA, 23 nt, artificial
  Oligomer
aauuaaagaguaaagcccauaca

SEQ ID NO: 21042 - RNA, 23 nt, artificial
  Oligomer
gaaaaaauccauauaccugaaag

SEQ ID NO: 21043 - RNA, 23 nt, artificial
  Oligomer
agaagcggccucgcaacucuuau

SEQ ID NO: 21044 - RNA, 23 nt, artificial
  Oligomer
guguuuuuaaaaguucgaagaca

SEQ ID NO: 21045 - RNA, 23 nt, artificial
  Oligomer
acugaguaacauucucuuuguga

SEQ ID NO: 21046 - RNA, 23 nt, artificial
  Oligomer
uuuccaucagcuugucuguuuca

SEQ ID NO: 21047 - RNA, 23 nt, artificial
  Oligomer
augauuguuuuugcucaaggcaa

SEQ ID NO: 21048 - RNA, 23 nt, artificial
  Oligomer
aauucucuuacugcuucuuuuca

SEQ ID NO: 21049 - RNA, 23 nt, artificial
  Oligomer
cagaaaucucaagauaaugucac

SEQ ID NO: 21050 - RNA, 23 nt, artificial
  Oligomer
cugcaacggaauuaggaagacca

SEQ ID NO: 21051 - RNA, 23 nt, artificial
  Oligomer
ucuggugcugcuccucugaagau

SEQ ID NO: 21052 - RNA, 23 nt, artificial
  Oligomer
cccugagacuucacaaucuucag

SEQ ID NO: 21053 - RNA, 23 nt, artificial
  Oligomer
acauguuuugugcagcacaguuu

SEQ ID NO: 21054 - RNA, 23 nt, artificial
  Oligomer
gcaacagauggauagucugucca

SEQ ID NO: 21055 - RNA, 23 nt, artificial
  Oligomer
cuaaggaguucucaucccucugu

SEQ ID NO: 21056 - RNA, 23 nt, artificial
  Oligomer
aagaagcggccucgcaacucuua

SEQ ID NO: 21057 - RNA, 23 nt, artificial
  Oligomer
cgacguuuccaucagcuugucug

SEQ ID NO: 21058 - RNA, 23 nt, artificial
  Oligomer
aaugauucgcauccaccagauga

SEQ ID NO: 21059 - RNA, 23 nt, artificial
  Oligomer
ugauucggacaguuggacccuga

SEQ ID NO: 21060 - RNA, 23 nt, artificial
  Oligomer
cuaacauguuuugugcagcacag

SEQ ID NO: 21061 - RNA, 23 nt, artificial
  Oligomer
uguccauguaauauucccauguu

SEQ ID NO: 21062 - RNA, 23 nt, artificial
  Oligomer
cuuacuuagccuacagauguccu

SEQ ID NO: 21063 - RNA, 23 nt, artificial
  Oligomer
cccacugaauuuuguguguaccu

SEQ ID NO: 21064 - RNA, 23 nt, artificial
  Oligomer
ccuccagaucagauucuucucuu

SEQ ID NO: 21065 - RNA, 23 nt, artificial
  Oligomer
caauaccuccuccagaucagauu

SEQ ID NO: 21066 - RNA, 23 nt, artificial
  Oligomer
cugggcaaccuuuuugauuucuu

SEQ ID NO: 21067 - RNA, 23 nt, artificial
  Oligomer
cugagacuucacaaucuucagau

SEQ ID NO: 21068 - RNA, 23 nt, artificial
  Oligomer
gaaaacugccuuuuaucugccca

SEQ ID NO: 21069 - RNA, 23 nt, artificial
  Oligomer
ccuggaaauaaaauuuaggacca

SEQ ID NO: 21070 - RNA, 23 nt, artificial
  Oligomer
ccaagcccagcuuaauggcucau

SEQ ID NO: 21071 - RNA, 23 nt, artificial
  Oligomer
gaaagaucugaugaagcccagcg

SEQ ID NO: 21072 - RNA, 23 nt, artificial
  Oligomer
ucuauagagcuugaggacccuca

SEQ ID NO: 21073 - RNA, 23 nt, artificial
  Oligomer
ccaucagcuugucuguuucauuc

SEQ ID NO: 21074 - RNA, 23 nt, artificial
  Oligomer
acagaacuguacgacguuuccau

SEQ ID NO: 21075 - RNA, 23 nt, artificial
  Oligomer
caaguuuugauucggacaguugg

SEQ ID NO: 21076 - RNA, 23 nt, artificial
  Oligomer
cuaguaguauuuuggcaggacca

SEQ ID NO: 21077 - RNA, 23 nt, artificial
  Oligomer
uuacuuagccuacagauguccua

SEQ ID NO: 21078 - RNA, 23 nt, artificial
  Oligomer
uguaaguuccugggcaaccuuuu

SEQ ID NO: 21079 - RNA, 23 nt, artificial
  Oligomer
uuguaaguuccugggcaaccuuu

SEQ ID NO: 21080 - RNA, 23 nt, artificial
  Oligomer
cuguacuuccaacaguuauuaua

SEQ ID NO: 21081 - RNA, 23 nt, artificial
  Oligomer
cuguacgacguuuccaucagcuu

SEQ ID NO: 21082 - RNA, 23 nt, artificial
  Oligomer
ccugagacuucacaaucuucaga

SEQ ID NO: 21083 - RNA, 23 nt, artificial
  Oligomer
gaaaaccuggcucuaagguggga

SEQ ID NO: 21084 - RNA, 23 nt, artificial
  Oligomer
aguuauugggaugucaucuuccu

SEQ ID NO: 21085 - RNA, 23 nt, artificial
  Oligomer
acugaauaaacaggaaaaugcca

SEQ ID NO: 21086 - RNA, 23 nt, artificial
  Oligomer
gaagauucaagcuuauuucaaug

SEQ ID NO: 21087 - RNA, 23 nt, artificial
  Oligomer
cuccuagcaccuggcuaguuucu

SEQ ID NO: 21088 - RNA, 23 nt, artificial
  Oligomer
caucaccuugauaaugggaugaa

SEQ ID NO: 21089 - RNA, 23 nt, artificial
  Oligomer
guugcuaauauugaggaggcuug

SEQ ID NO: 21090 - RNA, 23 nt, artificial
  Oligomer
agacauuaccaugaguaauaagg

SEQ ID NO: 21091 - RNA, 23 nt, artificial
  Oligomer
uccaacaguuauuauauguguga

SEQ ID NO: 21092 - RNA, 23 nt, artificial
  Oligomer
cgcauccaccagaugaauucuga

SEQ ID NO: 21093 - RNA, 23 nt, artificial
  Oligomer
acccugagacuucacaaucuuca

SEQ ID NO: 21094 - RNA, 23 nt, artificial
  Oligomer
gacuccuagcaccuggcuaguuu

SEQ ID NO: 21095 - RNA, 23 nt, artificial
  Oligomer
uaauauucccauguuuuuacccu

SEQ ID NO: 21096 - RNA, 23 nt, artificial
  Oligomer
caugaaaugucuggucuguccac

SEQ ID NO: 21097 - RNA, 23 nt, artificial
  Oligomer
cugcagaccugccaugccaauuu

SEQ ID NO: 21098 - RNA, 23 nt, artificial
  Oligomer
ccacuucuaucugggcuguugcu

SEQ ID NO: 21099 - RNA, 23 nt, artificial
  Oligomer
uuaugggccaagcccagcuuaau

SEQ ID NO: 21100 - RNA, 23 nt, artificial
  Oligomer
uguaacuccagcucugcuccgua

SEQ ID NO: 21101 - RNA, 23 nt, artificial
  Oligomer
cauauaccugaaagaucugauga

SEQ ID NO: 21102 - RNA, 23 nt, artificial
  Oligomer
accaagaaaagagaaaaaaucca

SEQ ID NO: 21103 - RNA, 23 nt, artificial
  Oligomer
cacauuccuuggauuacagcugu

SEQ ID NO: 21104 - RNA, 23 nt, artificial
  Oligomer
gaacuguacgacguuuccaucag

SEQ ID NO: 21105 - RNA, 23 nt, artificial
  Oligomer
gagacuucacaaucuucagauca

SEQ ID NO: 21106 - RNA, 23 nt, artificial
  Oligomer
uuugcucaaggcaaccagaggaa

SEQ ID NO: 21107 - RNA, 23 nt, artificial
  Oligomer
gaggcuuaggacuuuccacuccu

SEQ ID NO: 21108 - RNA, 23 nt, artificial
  Oligomer
gaacugacuagugagauggccug

SEQ ID NO: 21109 - RNA, 23 nt, artificial
  Oligomer
gugcugcuccucugaagauucaa

SEQ ID NO: 21110 - RNA, 23 nt, artificial
  Oligomer
aacauucucuuugugauggccuu

SEQ ID NO: 21111 - RNA, 23 nt, artificial
  Oligomer
cauuuuuucuacccuuuccuuug

SEQ ID NO: 21112 - RNA, 23 nt, artificial
  Oligomer
agaaccuaagaagaugaguguuu

SEQ ID NO: 21113 - RNA, 23 nt, artificial
  Oligomer
acugucagugcuugcuaacuuca

SEQ ID NO: 21114 - RNA, 23 nt, artificial
  Oligomer
auguuuugugcagcacaguuuuu

SEQ ID NO: 21115 - RNA, 23 nt, artificial
  Oligomer
cugccuugauuagacuccuagca

SEQ ID NO: 21116 - RNA, 23 nt, artificial
  Oligomer
cauacagagacagauauacuggg

SEQ ID NO: 21117 - RNA, 23 nt, artificial
  Oligomer
acaugaaaugucuggucugucca

SEQ ID NO: 21118 - RNA, 23 nt, artificial
  Oligomer
aauacaugaaaugucuggucugu

SEQ ID NO: 21119 - RNA, 23 nt, artificial
  Oligomer
cacuucuaucugggcuguugcua

SEQ ID NO: 21120 - RNA, 23 nt, artificial
  Oligomer
ugcuaaggaguucucaucccucu

SEQ ID NO: 21121 - RNA, 23 nt, artificial
  Oligomer
aauuuuguguguaccugugacua

SEQ ID NO: 21122 - RNA, 23 nt, artificial
  Oligomer
ugcugcuccucugaagauucaag

SEQ ID NO: 21123 - RNA, 23 nt, artificial
  Oligomer
cuucuuuucacuucagagcacac

SEQ ID NO: 21124 - RNA, 23 nt, artificial
  Oligomer
guuuuuaaaaguucgaagacauc

SEQ ID NO: 21125 - RNA, 23 nt, artificial
  Oligomer
agcuugucuguuucauucccuga

SEQ ID NO: 21126 - RNA, 23 nt, artificial
  Oligomer
cacagaacuguacgacguuucca

SEQ ID NO: 21127 - RNA, 23 nt, artificial
  Oligomer
cacaggaaugauucgcauccacc

SEQ ID NO: 21128 - RNA, 23 nt, artificial
  Oligomer
uuucuaacauguuuugugcagca

SEQ ID NO: 21129 - RNA, 23 nt, artificial
  Oligomer
uccuagcaccuggcuaguuucua

SEQ ID NO: 21130 - RNA, 23 nt, artificial
  Oligomer
agaucugaugaagcccagcgugu

SEQ ID NO: 21131 - RNA, 23 nt, artificial
  Oligomer
agaacuguacgacguuuccauca

SEQ ID NO: 21132 - RNA, 23 nt, artificial
  Oligomer
cccugccuugauuagacuccuag

SEQ ID NO: 21133 - RNA, 23 nt, artificial
  Oligomer
uuuugcucaaggcaaccagagga

SEQ ID NO: 21134 - RNA, 23 nt, artificial
  Oligomer
augccagagcuugugaacccugu

SEQ ID NO: 21135 - RNA, 23 nt, artificial
  Oligomer
ucaucccucugucagggucagua

SEQ ID NO: 21136 - RNA, 23 nt, artificial
  Oligomer
agauucaagcuuauuucaaugag

SEQ ID NO: 21137 - RNA, 23 nt, artificial
  Oligomer
aaaacugccuuuuaucugcccag

SEQ ID NO: 21138 - RNA, 23 nt, artificial
  Oligomer
uucagagcacacuuaugggccaa

SEQ ID NO: 21139 - RNA, 23 nt, artificial
  Oligomer
uccguaugccaagaggagacuuu

SEQ ID NO: 21140 - RNA, 23 nt, artificial
  Oligomer
ugaauucugaacugucagugcuu

SEQ ID NO: 21141 - RNA, 23 nt, artificial
  Oligomer
cuucagaucaaggacaagggcuu

SEQ ID NO: 21142 - RNA, 23 nt, artificial
  Oligomer
guuuuugcucaaggcaaccagag

SEQ ID NO: 21143 - RNA, 23 nt, artificial
  Oligomer
cuuauuucaaugagacugcagac

SEQ ID NO: 21144 - RNA, 23 nt, artificial
  Oligomer
uucucaucccucugucaggguca

SEQ ID NO: 21145 - RNA, 23 nt, artificial
  Oligomer
ucuuuucacuucagagcacacuu

SEQ ID NO: 21146 - RNA, 23 nt, artificial
  Oligomer
uacccuuuccuuuguaaguuccu

SEQ ID NO: 21147 - RNA, 23 nt, artificial
  Oligomer
uuuuuucuacccuuuccuuugua

SEQ ID NO: 21148 - RNA, 23 nt, artificial
  Oligomer
uauaugggccgcacaaguuuuga

SEQ ID NO: 21149 - RNA, 23 nt, artificial
  Oligomer
cugaauaaacaggaaaaugccag

SEQ ID NO: 21150 - RNA, 23 nt, artificial
  Oligomer
uguugcuaauauugaggaggcuu

SEQ ID NO: 21151 - RNA, 23 nt, artificial
  Oligomer
gcuguugcuaauauugaggaggc

SEQ ID NO: 21152 - RNA, 23 nt, artificial
  Oligomer
gaccuuauaguguuaauaucuug

SEQ ID NO: 21153 - RNA, 23 nt, artificial
  Oligomer
cuggaaauaaaauuuaggaccaa

SEQ ID NO: 21154 - RNA, 23 nt, artificial
  Oligomer
uaacauucucuuugugauggccu

SEQ ID NO: 21155 - RNA, 23 nt, artificial
  Oligomer
cugaaagaucugaugaagcccag

SEQ ID NO: 21156 - RNA, 23 nt, artificial
  Oligomer
caacaguuauuauaugugugaug

SEQ ID NO: 21157 - RNA, 23 nt, artificial
  Oligomer
ugucuguuucauucccugauguu

SEQ ID NO: 21158 - RNA, 23 nt, artificial
  Oligomer
cguuuccaucagcuugucuguuu

SEQ ID NO: 21159 - RNA, 23 nt, artificial
  Oligomer
ugaccugcucaucuauacacggu

SEQ ID NO: 21160 - RNA, 23 nt, artificial
  Oligomer
auuugaccugcucaucuauacac

SEQ ID NO: 21161 - RNA, 23 nt, artificial
  Oligomer
gaauucugaacugucagugcuug

SEQ ID NO: 21162 - RNA, 23 nt, artificial
  Oligomer
cagaucaaggacaagggcuugua

SEQ ID NO: 21163 - RNA, 23 nt, artificial
  Oligomer
gccaugcuagacaagcuugucca

SEQ ID NO: 21164 - RNA, 23 nt, artificial
  Oligomer
auacagagacagauauacuggga

SEQ ID NO: 21165 - RNA, 23 nt, artificial
  Oligomer
auagucuguccaaauggacauaa

SEQ ID NO: 21166 - RNA, 23 nt, artificial
  Oligomer
ucucuugaagaacugacuaguga

SEQ ID NO: 21167 - RNA, 23 nt, artificial
  Oligomer
acugcagaccugccaugccaauu

SEQ ID NO: 21168 - RNA, 23 nt, artificial
  Oligomer
cuguaauagugugauuacuaugc

SEQ ID NO: 21169 - RNA, 23 nt, artificial
  Oligomer
gaaacauagagaucuauguacug

SEQ ID NO: 21170 - RNA, 23 nt, artificial
  Oligomer
acaacuaccuccucagucugggu

SEQ ID NO: 21171 - RNA, 23 nt, artificial
  Oligomer
cucaauuucuggaaaacugccuu

SEQ ID NO: 21172 - RNA, 23 nt, artificial
  Oligomer
ucucaauuucuggaaaacugccu

SEQ ID NO: 21173 - RNA, 23 nt, artificial
  Oligomer
cuucagagcacacuuaugggcca

SEQ ID NO: 21174 - RNA, 23 nt, artificial
  Oligomer
cucuuugugauggccuuccugcu

SEQ ID NO: 21175 - RNA, 23 nt, artificial
  Oligomer
ggcaaccuuuuugauuucuucca

SEQ ID NO: 21176 - RNA, 23 nt, artificial
  Oligomer
aacauguuuugugcagcacaguu

SEQ ID NO: 21177 - RNA, 23 nt, artificial
  Oligomer
ucucaaaaccaaagccugaguga

SEQ ID NO: 21178 - RNA, 23 nt, artificial
  Oligomer
ucugcagucucauugaaauaagc

SEQ ID NO: 21179 - RNA, 23 nt, artificial
  Oligomer
ugaggguuuacauaaaauaaagg

SEQ ID NO: 21180 - RNA, 23 nt, artificial
  Oligomer
ucagguauauggauuuuuucucu

SEQ ID NO: 21181 - RNA, 23 nt, artificial
  Oligomer
auaacuuggguaucaccaaaacc

SEQ ID NO: 21182 - RNA, 23 nt, artificial
  Oligomer
auggauuuuuucucuuuucuugg

SEQ ID NO: 21183 - RNA, 23 nt, artificial
  Oligomer
ugaaucuucagaggagcagcacc

SEQ ID NO: 21184 - RNA, 23 nt, artificial
  Oligomer
uucagguauauggauuuuuucuc

SEQ ID NO: 21185 - RNA, 23 nt, artificial
  Oligomer
aucccaauaacuuggguaucacc

SEQ ID NO: 21186 - RNA, 23 nt, artificial
  Oligomer
uacaguucugugacauuaucuug

SEQ ID NO: 21187 - RNA, 23 nt, artificial
  Oligomer
uccaacuguccgaaucaaaacuu

SEQ ID NO: 21188 - RNA, 23 nt, artificial
  Oligomer
aaaaacaugggaauauuacaugg

SEQ ID NO: 21189 - RNA, 23 nt, artificial
  Oligomer
uuaagcugggcuuggcccauaag

SEQ ID NO: 21190 - RNA, 23 nt, artificial
  Oligomer
uugaaauaagcuugaaucuucag

SEQ ID NO: 21191 - RNA, 23 nt, artificial
  Oligomer
aaacaggguucacaagcucuggc

SEQ ID NO: 21192 - RNA, 23 nt, artificial
  Oligomer
uccaggucaugagccauuaagcu

SEQ ID NO: 21193 - RNA, 23 nt, artificial
  Oligomer
aacaccaucauacucgauaguug

SEQ ID NO: 21194 - RNA, 23 nt, artificial
  Oligomer
ucugguugccuugagcaaaaaca

SEQ ID NO: 21195 - RNA, 23 nt, artificial
  Oligomer
gucaguucuucaagagaaacagg

SEQ ID NO: 21196 - RNA, 23 nt, artificial
  Oligomer
auacggagcagagcuggaguuac

SEQ ID NO: 21197 - RNA, 23 nt, artificial
  Oligomer
uccuaaauuuuauuuccagguca

SEQ ID NO: 21198 - RNA, 23 nt, artificial
  Oligomer
uccugguccugccaaaauacuac

SEQ ID NO: 21199 - RNA, 23 nt, artificial
  Oligomer
ucaagagaaacaggguucacaag

SEQ ID NO: 21200 - RNA, 23 nt, artificial
  Oligomer
ugcaaauuggcauggcaggucug

SEQ ID NO: 21201 - RNA, 23 nt, artificial
  Oligomer
ucuggcauuuuccuguuuauuca

SEQ ID NO: 21202 - RNA, 23 nt, artificial
  Oligomer
uccagaaauugagaggucuauuu

SEQ ID NO: 21203 - RNA, 23 nt, artificial
  Oligomer
aucugaucuggaggagguauugg

SEQ ID NO: 21204 - RNA, 23 nt, artificial
  Oligomer
uugcgaggccgcuucuucuucuu

SEQ ID NO: 21205 - RNA, 23 nt, artificial
  Oligomer
aucacacauauaauaacuguugg

SEQ ID NO: 21206 - RNA, 23 nt, artificial
  Oligomer
acacauauaauaacuguuggaag

SEQ ID NO: 21207 - RNA, 23 nt, artificial
  Oligomer
ucguacaguucugugacauuauc

SEQ ID NO: 21208 - RNA, 23 nt, artificial
  Oligomer
cugaaguuagcaagcacugacag

SEQ ID NO: 21209 - RNA, 23 nt, artificial
  Oligomer
uugcucguaacaucagggaauga

SEQ ID NO: 21210 - RNA, 23 nt, artificial
  Oligomer
aucagggaaugaaacagacaagc

SEQ ID NO: 21211 - RNA, 23 nt, artificial
  Oligomer
agaagaaucugaucuggaggagg

SEQ ID NO: 21212 - RNA, 23 nt, artificial
  Oligomer
aucccauuaucaaggugauggcu

SEQ ID NO: 21213 - RNA, 23 nt, artificial
  Oligomer
aaagccgcgucuugucaguuucc

SEQ ID NO: 21214 - RNA, 23 nt, artificial
  Oligomer
gaaucauuccugugggcuuuuug

SEQ ID NO: 21215 - RNA, 23 nt, artificial
  Oligomer
aggugcuaggagucuaaucaagg

SEQ ID NO: 21216 - RNA, 23 nt, artificial
  Oligomer
uaagcugggcuuggcccauaagu

SEQ ID NO: 21217 - RNA, 23 nt, artificial
  Oligomer
acaagcugauggaaacgucguac

SEQ ID NO: 21218 - RNA, 23 nt, artificial
  Oligomer
uguccuugaucugaagauuguga

SEQ ID NO: 21219 - RNA, 23 nt, artificial
  Oligomer
aaaacugugcugcacaaaacaug

SEQ ID NO: 21220 - RNA, 23 nt, artificial
  Oligomer
aacaaucauccaacucaaauuug

SEQ ID NO: 21221 - RNA, 23 nt, artificial
  Oligomer
gucugcucauuguugccuguacc

SEQ ID NO: 21222 - RNA, 23 nt, artificial
  Oligomer
aaccaucacacauauaauaacug

SEQ ID NO: 21223 - RNA, 23 nt, artificial
  Oligomer
ucucaggguccaacuguccgaau

SEQ ID NO: 21224 - RNA, 23 nt, artificial
  Oligomer
uaaaaacugugcugcacaaaaca

SEQ ID NO: 21225 - RNA, 23 nt, artificial
  Oligomer
uguaugggcuuuacucuuuaauu

SEQ ID NO: 21226 - RNA, 23 nt, artificial
  Oligomer
cuuucagguauauggauuuuuuc

SEQ ID NO: 21227 - RNA, 23 nt, artificial
  Oligomer
auaagaguugcgaggccgcuucu

SEQ ID NO: 21228 - RNA, 23 nt, artificial
  Oligomer
ugucuucgaacuuuuaaaaacac

SEQ ID NO: 21229 - RNA, 23 nt, artificial
  Oligomer
ucacaaagagaauguuacucagu

SEQ ID NO: 21230 - RNA, 23 nt, artificial
  Oligomer
ugaaacagacaagcugauggaaa

SEQ ID NO: 21231 - RNA, 23 nt, artificial
  Oligomer
uugccuugagcaaaaacaaucau

SEQ ID NO: 21232 - RNA, 23 nt, artificial
  Oligomer
ugaaaagaagcaguaagagaauu

SEQ ID NO: 21233 - RNA, 23 nt, artificial
  Oligomer
gugacauuaucuugagauuucug

SEQ ID NO: 21234 - RNA, 23 nt, artificial
  Oligomer
uggucuuccuaauuccguugcag

SEQ ID NO: 21235 - RNA, 23 nt, artificial
  Oligomer
aucuucagaggagcagcaccaga

SEQ ID NO: 21236 - RNA, 23 nt, artificial
  Oligomer
cugaagauugugaagucucaggg

SEQ ID NO: 21237 - RNA, 23 nt, artificial
  Oligomer
aaacugugcugcacaaaacaugu

SEQ ID NO: 21238 - RNA, 23 nt, artificial
  Oligomer
uggacagacuauccaucuguugc

SEQ ID NO: 21239 - RNA, 23 nt, artificial
  Oligomer
acagagggaugagaacuccuuag

SEQ ID NO: 21240 - RNA, 23 nt, artificial
  Oligomer
uaagaguugcgaggccgcuucuu

SEQ ID NO: 21241 - RNA, 23 nt, artificial
  Oligomer
cagacaagcugauggaaacgucg

SEQ ID NO: 21242 - RNA, 23 nt, artificial
  Oligomer
ucaucugguggaugcgaaucauu

SEQ ID NO: 21243 - RNA, 23 nt, artificial
  Oligomer
ucaggguccaacuguccgaauca

SEQ ID NO: 21244 - RNA, 23 nt, artificial
  Oligomer
cugugcugcacaaaacauguuag

SEQ ID NO: 21245 - RNA, 23 nt, artificial
  Oligomer
aacaugggaauauuacauggaca

SEQ ID NO: 21246 - RNA, 23 nt, artificial
  Oligomer
aggacaucuguaggcuaaguaag

SEQ ID NO: 21247 - RNA, 23 nt, artificial
  Oligomer
agguacacacaaaauucaguggg

SEQ ID NO: 21248 - RNA, 23 nt, artificial
  Oligomer
aagagaagaaucugaucuggagg

SEQ ID NO: 21249 - RNA, 23 nt, artificial
  Oligomer
aaucugaucuggaggagguauug

SEQ ID NO: 21250 - RNA, 23 nt, artificial
  Oligomer
aagaaaucaaaaagguugcccag

SEQ ID NO: 21251 - RNA, 23 nt, artificial
  Oligomer
aucugaagauugugaagucucag

SEQ ID NO: 21252 - RNA, 23 nt, artificial
  Oligomer
ugggcagauaaaaggcaguuuuc

SEQ ID NO: 21253 - RNA, 23 nt, artificial
  Oligomer
ugguccuaaauuuuauuuccagg

SEQ ID NO: 21254 - RNA, 23 nt, artificial
  Oligomer
augagccauuaagcugggcuugg

SEQ ID NO: 21255 - RNA, 23 nt, artificial
  Oligomer
cgcugggcuucaucagaucuuuc

SEQ ID NO: 21256 - RNA, 23 nt, artificial
  Oligomer
ugaggguccucaagcucuauaga

SEQ ID NO: 21257 - RNA, 23 nt, artificial
  Oligomer
gaaugaaacagacaagcugaugg

SEQ ID NO: 21258 - RNA, 23 nt, artificial
  Oligomer
auggaaacgucguacaguucugu

SEQ ID NO: 21259 - RNA, 23 nt, artificial
  Oligomer
ccaacuguccgaaucaaaacuug

SEQ ID NO: 21260 - RNA, 23 nt, artificial
  Oligomer
ugguccugccaaaauacuacuag

SEQ ID NO: 21261 - RNA, 23 nt, artificial
  Oligomer
uaggacaucuguaggcuaaguaa

SEQ ID NO: 21262 - RNA, 23 nt, artificial
  Oligomer
aaaagguugcccaggaacuuaca

SEQ ID NO: 21263 - RNA, 23 nt, artificial
  Oligomer
aaagguugcccaggaacuuacaa

SEQ ID NO: 21264 - RNA, 23 nt, artificial
  Oligomer
uauaauaacuguuggaaguacag

SEQ ID NO: 21265 - RNA, 23 nt, artificial
  Oligomer
aagcugauggaaacgucguacag

SEQ ID NO: 21266 - RNA, 23 nt, artificial
  Oligomer
ucugaagauugugaagucucagg

SEQ ID NO: 21267 - RNA, 23 nt, artificial
  Oligomer
ucccaccuuagagccagguuuuc

SEQ ID NO: 21268 - RNA, 23 nt, artificial
  Oligomer
aggaagaugacaucccaauaacu

SEQ ID NO: 21269 - RNA, 23 nt, artificial
  Oligomer
uggcauuuuccuguuuauucagu

SEQ ID NO: 21270 - RNA, 23 nt, artificial
  Oligomer
cauugaaauaagcuugaaucuuc

SEQ ID NO: 21271 - RNA, 23 nt, artificial
  Oligomer
agaaacuagccaggugcuaggag

SEQ ID NO: 21272 - RNA, 23 nt, artificial
  Oligomer
uucaucccauuaucaaggugaug

SEQ ID NO: 21273 - RNA, 23 nt, artificial
  Oligomer
caagccuccucaauauuagcaac

SEQ ID NO: 21274 - RNA, 23 nt, artificial
  Oligomer
ccuuauuacucaugguaaugucu

SEQ ID NO: 21275 - RNA, 23 nt, artificial
  Oligomer
ucacacauauaauaacuguugga

SEQ ID NO: 21276 - RNA, 23 nt, artificial
  Oligomer
ucagaauucaucugguggaugcg

SEQ ID NO: 21277 - RNA, 23 nt, artificial
  Oligomer
ugaagauugugaagucucagggu

SEQ ID NO: 21278 - RNA, 23 nt, artificial
  Oligomer
aaacuagccaggugcuaggaguc

SEQ ID NO: 21279 - RNA, 23 nt, artificial
  Oligomer
aggguaaaaacaugggaauauua

SEQ ID NO: 21280 - RNA, 23 nt, artificial
  Oligomer
guggacagaccagacauuucaug

SEQ ID NO: 21281 - RNA, 23 nt, artificial
  Oligomer
aaauuggcauggcaggucugcag

SEQ ID NO: 21282 - RNA, 23 nt, artificial
  Oligomer
agcaacagcccagauagaagugg

SEQ ID NO: 21283 - RNA, 23 nt, artificial
  Oligomer
auuaagcugggcuuggcccauaa

SEQ ID NO: 21284 - RNA, 23 nt, artificial
  Oligomer
uacggagcagagcuggaguuaca

SEQ ID NO: 21285 - RNA, 23 nt, artificial
  Oligomer
ucaucagaucuuucagguauaug

SEQ ID NO: 21286 - RNA, 23 nt, artificial
  Oligomer
uggauuuuuucucuuuucuuggu

SEQ ID NO: 21287 - RNA, 23 nt, artificial
  Oligomer
acagcuguaauccaaggaaugug

SEQ ID NO: 21288 - RNA, 23 nt, artificial
  Oligomer
cugauggaaacgucguacaguuc

SEQ ID NO: 21289 - RNA, 23 nt, artificial
  Oligomer
ugaucugaagauugugaagucuc

SEQ ID NO: 21290 - RNA, 23 nt, artificial
  Oligomer
uuccucugguugccuugagcaaa

SEQ ID NO: 21291 - RNA, 23 nt, artificial
  Oligomer
aggaguggaaaguccuaagccuc

SEQ ID NO: 21292 - RNA, 23 nt, artificial
  Oligomer
caggccaucucacuagucaguuc

SEQ ID NO: 21293 - RNA, 23 nt, artificial
  Oligomer
uugaaucuucagaggagcagcac

SEQ ID NO: 21294 - RNA, 23 nt, artificial
  Oligomer
aaggccaucacaaagagaauguu

SEQ ID NO: 21295 - RNA, 23 nt, artificial
  Oligomer
caaaggaaaggguagaaaaaaug

SEQ ID NO: 21296 - RNA, 23 nt, artificial
  Oligomer
aaacacucaucuucuuagguucu

SEQ ID NO: 21297 - RNA, 23 nt, artificial
  Oligomer
ugaaguuagcaagcacugacagu

SEQ ID NO: 21298 - RNA, 23 nt, artificial
  Oligomer
aaaaacugugcugcacaaaacau

SEQ ID NO: 21299 - RNA, 23 nt, artificial
  Oligomer
ugcuaggagucuaaucaaggcag

SEQ ID NO: 21300 - RNA, 23 nt, artificial
  Oligomer
cccaguauaucugucucuguaug

SEQ ID NO: 21301 - RNA, 23 nt, artificial
  Oligomer
uggacagaccagacauuucaugu

SEQ ID NO: 21302 - RNA, 23 nt, artificial
  Oligomer
acagaccagacauuucauguauu

SEQ ID NO: 21303 - RNA, 23 nt, artificial
  Oligomer
uagcaacagcccagauagaagug

SEQ ID NO: 21304 - RNA, 23 nt, artificial
  Oligomer
agagggaugagaacuccuuagca

SEQ ID NO: 21305 - RNA, 23 nt, artificial
  Oligomer
uagucacagguacacacaaaauu

SEQ ID NO: 21306 - RNA, 23 nt, artificial
  Oligomer
cuugaaucuucagaggagcagca

SEQ ID NO: 21307 - RNA, 23 nt, artificial
  Oligomer
gugugcucugaagugaaaagaag

SEQ ID NO: 21308 - RNA, 23 nt, artificial
  Oligomer
gaugucuucgaacuuuuaaaaac

SEQ ID NO: 21309 - RNA, 23 nt, artificial
  Oligomer
ucagggaaugaaacagacaagcu

SEQ ID NO: 21310 - RNA, 23 nt, artificial
  Oligomer
uggaaacgucguacaguucugug

SEQ ID NO: 21311 - RNA, 23 nt, artificial
  Oligomer
gguggaugcgaaucauuccugug

SEQ ID NO: 21312 - RNA, 23 nt, artificial
  Oligomer
ugcugcacaaaacauguuagaaa

SEQ ID NO: 21313 - RNA, 23 nt, artificial
  Oligomer
uagaaacuagccaggugcuagga

SEQ ID NO: 21314 - RNA, 23 nt, artificial
  Oligomer
acacgcugggcuucaucagaucu

SEQ ID NO: 21315 - RNA, 23 nt, artificial
  Oligomer
ugauggaaacgucguacaguucu

SEQ ID NO: 21316 - RNA, 23 nt, artificial
  Oligomer
cuaggagucuaaucaaggcaggg

SEQ ID NO: 21317 - RNA, 23 nt, artificial
  Oligomer
uccucugguugccuugagcaaaa

SEQ ID NO: 21318 - RNA, 23 nt, artificial
  Oligomer
acaggguucacaagcucuggcau

SEQ ID NO: 21319 - RNA, 23 nt, artificial
  Oligomer
uacugacccugacagagggauga

SEQ ID NO: 21320 - RNA, 23 nt, artificial
  Oligomer
cucauugaaauaagcuugaaucu

SEQ ID NO: 21321 - RNA, 23 nt, artificial
  Oligomer
cugggcagauaaaaggcaguuuu

SEQ ID NO: 21322 - RNA, 23 nt, artificial
  Oligomer
uuggcccauaagugugcucugaa

SEQ ID NO: 21323 - RNA, 23 nt, artificial
  Oligomer
aaagucuccucuuggcauacgga

SEQ ID NO: 21324 - RNA, 23 nt, artificial
  Oligomer
aagcacugacaguucagaauuca

SEQ ID NO: 21325 - RNA, 23 nt, artificial
  Oligomer
aagcccuuguccuugaucugaag

SEQ ID NO: 21326 - RNA, 23 nt, artificial
  Oligomer
cucugguugccuugagcaaaaac

SEQ ID NO: 21327 - RNA, 23 nt, artificial
  Oligomer
gucugcagucucauugaaauaag

SEQ ID NO: 21328 - RNA, 23 nt, artificial
  Oligomer
ugacccugacagagggaugagaa

SEQ ID NO: 21329 - RNA, 23 nt, artificial
  Oligomer
aagugugcucugaagugaaaaga

SEQ ID NO: 21330 - RNA, 23 nt, artificial
  Oligomer
aggaacuuacaaaggaaagggua

SEQ ID NO: 21331 - RNA, 23 nt, artificial
  Oligomer
uacaaaggaaaggguagaaaaaa

SEQ ID NO: 21332 - RNA, 23 nt, artificial
  Oligomer
ucaaaacuugugcggcccauaua

SEQ ID NO: 21333 - RNA, 23 nt, artificial
  Oligomer
cuggcauuuuccuguuuauucag

SEQ ID NO: 21334 - RNA, 23 nt, artificial
  Oligomer
aagccuccucaauauuagcaaca

SEQ ID NO: 21335 - RNA, 23 nt, artificial
  Oligomer
gccuccucaauauuagcaacagc

SEQ ID NO: 21336 - RNA, 23 nt, artificial
  Oligomer
caagauauuaacacuauaagguc

SEQ ID NO: 21337 - RNA, 23 nt, artificial
  Oligomer
uugguccuaaauuuuauuuccag

SEQ ID NO: 21338 - RNA, 23 nt, artificial
  Oligomer
aggccaucacaaagagaauguua

SEQ ID NO: 21339 - RNA, 23 nt, artificial
  Oligomer
cugggcuucaucagaucuuucag

SEQ ID NO: 21340 - RNA, 23 nt, artificial
  Oligomer
caucacacauauaauaacuguug

SEQ ID NO: 21341 - RNA, 23 nt, artificial
  Oligomer
aacaucagggaaugaaacagaca

SEQ ID NO: 21342 - RNA, 23 nt, artificial
  Oligomer
aaacagacaagcugauggaaacg

SEQ ID NO: 21343 - RNA, 23 nt, artificial
  Oligomer
accguguauagaugagcagguca

SEQ ID NO: 21344 - RNA, 23 nt, artificial
  Oligomer
guguauagaugagcaggucaaau

SEQ ID NO: 21345 - RNA, 23 nt, artificial
  Oligomer
caagcacugacaguucagaauuc

SEQ ID NO: 21346 - RNA, 23 nt, artificial
  Oligomer
uacaagcccuuguccuugaucug

SEQ ID NO: 21347 - RNA, 23 nt, artificial
  Oligomer
uggacaagcuugucuagcauggc

SEQ ID NO: 21348 - RNA, 23 nt, artificial
  Oligomer
ucccaguauaucugucucuguau

SEQ ID NO: 21349 - RNA, 23 nt, artificial
  Oligomer
uuauguccauuuggacagacuau

SEQ ID NO: 21350 - RNA, 23 nt, artificial
  Oligomer
ucacuagucaguucuucaagaga

SEQ ID NO: 21351 - RNA, 23 nt, artificial
  Oligomer
aauuggcauggcaggucugcagu

SEQ ID NO: 21352 - RNA, 23 nt, artificial
  Oligomer
gcauaguaaucacacuauuacag

SEQ ID NO: 21353 - RNA, 23 nt, artificial
  Oligomer
caguacauagaucucuauguuuc

SEQ ID NO: 21354 - RNA, 23 nt, artificial
  Oligomer
acccagacugaggagguaguugu

SEQ ID NO: 21355 - RNA, 23 nt, artificial
  Oligomer
aaggcaguuuuccagaaauugag

SEQ ID NO: 21356 - RNA, 23 nt, artificial
  Oligomer
aggcaguuuuccagaaauugaga

SEQ ID NO: 21357 - RNA, 23 nt, artificial
  Oligomer
uggcccauaagugugcucugaag

SEQ ID NO: 21358 - RNA, 23 nt, artificial
  Oligomer
agcaggaaggccaucacaaagag

SEQ ID NO: 21359 - RNA, 23 nt, artificial
  Oligomer
uggaagaaaucaaaaagguugcc

SEQ ID NO: 21360 - RNA, 23 nt, artificial
  Oligomer
aacugugcugcacaaaacauguu

SEQ ID NO: 21361 - RNA, 23 nt, artificial
  Oligomer
ucacucaggcuuugguuuugaga

SEQ ID NO: 21362 - RNA, 23 nt, artificial
  Oligomer
gggagaaaugacuuugaaaaccu

SEQ ID NO: 21363 - RNA, 23 nt, artificial
  Oligomer
ugggagaaaugacuuugaaaacc

SEQ ID NO: 21364 - RNA, 23 nt, artificial
  Oligomer
cugggagaaaugacuuugaaaac

SEQ ID NO: 21365 - RNA, 23 nt, artificial
  Oligomer
acugggagaaaugacuuugaaaa

SEQ ID NO: 21366 - RNA, 23 nt, artificial
  Oligomer
uacugggagaaaugacuuugaaa

SEQ ID NO: 21367 - RNA, 23 nt, artificial
  Oligomer
gagugaacagaccaagaaaagag

SEQ ID NO: 21368 - RNA, 23 nt, artificial
  Oligomer
agagugaacagaccaagaaaaga

SEQ ID NO: 21369 - RNA, 23 nt, artificial
  Oligomer
gagagugaacagaccaagaaaag

SEQ ID NO: 21370 - RNA, 23 nt, artificial
  Oligomer
agagagugaacagaccaagaaaa

SEQ ID NO: 21371 - RNA, 23 nt, artificial
  Oligomer
aagagagugaacagaccaagaaa

SEQ ID NO: 21372 - RNA, 23 nt, artificial
  Oligomer
gcaccuggcuaguuucuaacaug

SEQ ID NO: 21373 - RNA, 23 nt, artificial
  Oligomer
agcaccuggcuaguuucuaacau

SEQ ID NO: 21374 - RNA, 23 nt, artificial
  Oligomer
uagcaccuggcuaguuucuaaca

SEQ ID NO: 21375 - RNA, 23 nt, artificial
  Oligomer
cuagcaccuggcuaguuucuaac

SEQ ID NO: 21376 - RNA, 23 nt, artificial
  Oligomer
ccuagcaccuggcuaguuucuaa

SEQ ID NO: 21377 - RNA, 23 nt, artificial
  Oligomer
ggguuuuggugauacccaaguua

SEQ ID NO: 21378 - RNA, 23 nt, artificial
  Oligomer
gggguuuuggugauacccaaguu

SEQ ID NO: 21379 - RNA, 23 nt, artificial
  Oligomer
agggguuuuggugauacccaagu

SEQ ID NO: 21380 - RNA, 23 nt, artificial
  Oligomer
gagggguuuuggugauacccaag

SEQ ID NO: 21381 - RNA, 23 nt, artificial
  Oligomer
ggagggguuuuggugauacccaa

SEQ ID NO: 21382 - RNA, 23 nt, artificial
  Oligomer
cagaccaagaaaagagaaaaaau

SEQ ID NO: 21383 - RNA, 23 nt, artificial
  Oligomer
acagaccaagaaaagagaaaaaa

SEQ ID NO: 21384 - RNA, 23 nt, artificial
  Oligomer
aacagaccaagaaaagagaaaaa

SEQ ID NO: 21385 - RNA, 23 nt, artificial
  Oligomer
gaacagaccaagaaaagagaaaa

SEQ ID NO: 21386 - RNA, 23 nt, artificial
  Oligomer
ugaacagaccaagaaaagagaaa

SEQ ID NO: 21387 - RNA, 23 nt, artificial
  Oligomer
cauaguggagagaacugaauaaa

SEQ ID NO: 21388 - RNA, 23 nt, artificial
  Oligomer
ccauaguggagagaacugaauaa

SEQ ID NO: 21389 - RNA, 23 nt, artificial
  Oligomer
gccauaguggagagaacugaaua

SEQ ID NO: 21390 - RNA, 23 nt, artificial
  Oligomer
agccauaguggagagaacugaau

SEQ ID NO: 21391 - RNA, 23 nt, artificial
  Oligomer
aagccauaguggagagaacugaa

SEQ ID NO: 21392 - RNA, 23 nt, artificial
  Oligomer
agaccaagaaaagagaaaaaauc

SEQ ID NO: 21393 - RNA, 23 nt, artificial
  Oligomer
aggaaaacuugguucugaaugag

SEQ ID NO: 21394 - RNA, 23 nt, artificial
  Oligomer
caggaaaacuugguucugaauga

SEQ ID NO: 21395 - RNA, 23 nt, artificial
  Oligomer
ccaggaaaacuugguucugaaug

SEQ ID NO: 21396 - RNA, 23 nt, artificial
  Oligomer
accaggaaaacuugguucugaau

SEQ ID NO: 21397 - RNA, 23 nt, artificial
  Oligomer
gaccaggaaaacuugguucugaa

SEQ ID NO: 21398 - RNA, 23 nt, artificial
  Oligomer
ggagccugagccacaaaaauguu

SEQ ID NO: 21399 - RNA, 23 nt, artificial
  Oligomer
gggagccugagccacaaaaaugu

SEQ ID NO: 21400 - RNA, 23 nt, artificial
  Oligomer
ggggagccugagccacaaaaaug

SEQ ID NO: 21401 - RNA, 23 nt, artificial
  Oligomer
uggggagccugagccacaaaaau

SEQ ID NO: 21402 - RNA, 23 nt, artificial
  Oligomer
cuggggagccugagccacaaaaa

SEQ ID NO: 21403 - RNA, 23 nt, artificial
  Oligomer
ccagcauagggcuagcaaauuug

SEQ ID NO: 21404 - RNA, 23 nt, artificial
  Oligomer
cccagcauagggcuagcaaauuu

SEQ ID NO: 21405 - RNA, 23 nt, artificial
  Oligomer
gcccagcauagggcuagcaaauu

SEQ ID NO: 21406 - RNA, 23 nt, artificial
  Oligomer
ggcccagcauagggcuagcaaau

SEQ ID NO: 21407 - RNA, 23 nt, artificial
  Oligomer
uggcccagcauagggcuagcaaa

SEQ ID NO: 21408 - RNA, 23 nt, artificial
  Oligomer
ucaugaccuggaaauaaaauuua

SEQ ID NO: 21409 - RNA, 23 nt, artificial
  Oligomer
cucaugaccuggaaauaaaauuu

SEQ ID NO: 21410 - RNA, 23 nt, artificial
  Oligomer
gcucaugaccuggaaauaaaauu

SEQ ID NO: 21411 - RNA, 23 nt, artificial
  Oligomer
ggcucaugaccuggaaauaaaau

SEQ ID NO: 21412 - RNA, 23 nt, artificial
  Oligomer
uggcucaugaccuggaaauaaaa

SEQ ID NO: 21413 - RNA, 23 nt, artificial
  Oligomer
agcccagcguguuuuuaaaaguu

SEQ ID NO: 21414 - RNA, 23 nt, artificial
  Oligomer
aagcccagcguguuuuuaaaagu

SEQ ID NO: 21415 - RNA, 23 nt, artificial
  Oligomer
gaagcccagcguguuuuuaaaag

SEQ ID NO: 21416 - RNA, 23 nt, artificial
  Oligomer
ugaagcccagcguguuuuuaaaa

SEQ ID NO: 21417 - RNA, 23 nt, artificial
  Oligomer
augaagcccagcguguuuuuaaa

SEQ ID NO: 21418 - RNA, 23 nt, artificial
  Oligomer
gcagaaaucucaagauaauguca

SEQ ID NO: 21419 - RNA, 23 nt, artificial
  Oligomer
ugcagaaaucucaagauaauguc

SEQ ID NO: 21420 - RNA, 23 nt, artificial
  Oligomer
augcagaaaucucaagauaaugu

SEQ ID NO: 21421 - RNA, 23 nt, artificial
  Oligomer
uaugcagaaaucucaagauaaug

SEQ ID NO: 21422 - RNA, 23 nt, artificial
  Oligomer
uuaugcagaaaucucaagauaau

SEQ ID NO: 21423 - RNA, 23 nt, artificial
  Oligomer
ggaagagcugcaacggaauuagg

SEQ ID NO: 21424 - RNA, 23 nt, artificial
  Oligomer
aggaagagcugcaacggaauuag

SEQ ID NO: 21425 - RNA, 23 nt, artificial
  Oligomer
gaggaagagcugcaacggaauua

SEQ ID NO: 21426 - RNA, 23 nt, artificial
  Oligomer
agaggaagagcugcaacggaauu

SEQ ID NO: 21427 - RNA, 23 nt, artificial
  Oligomer
gagaggaagagcugcaacggaau

SEQ ID NO: 21428 - RNA, 23 nt, artificial
  Oligomer
ggagagaacugaauaaacaggaa

SEQ ID NO: 21429 - RNA, 23 nt, artificial
  Oligomer
uggagagaacugaauaaacagga

SEQ ID NO: 21430 - RNA, 23 nt, artificial
  Oligomer
guggagagaacugaauaaacagg

SEQ ID NO: 21431 - RNA, 23 nt, artificial
  Oligomer
aguggagagaacugaauaaacag

SEQ ID NO: 21432 - RNA, 23 nt, artificial
  Oligomer
uaguggagagaacugaauaaaca

SEQ ID NO: 21433 - RNA, 23 nt, artificial
  Oligomer
guguguaccugugacuaaacaac

SEQ ID NO: 21434 - RNA, 23 nt, artificial
  Oligomer
uguguguaccugugacuaaacaa

SEQ ID NO: 21435 - RNA, 23 nt, artificial
  Oligomer
uuguguguaccugugacuaaaca

SEQ ID NO: 21436 - RNA, 23 nt, artificial
  Oligomer
uuuguguguaccugugacuaaac

SEQ ID NO: 21437 - RNA, 23 nt, artificial
  Oligomer
uuuuguguguaccugugacuaaa

SEQ ID NO: 21438 - RNA, 23 nt, artificial
  Oligomer
gcacuaugggacugaguaacauu

SEQ ID NO: 21439 - RNA, 23 nt, artificial
  Oligomer
ugcacuaugggacugaguaacau

SEQ ID NO: 21440 - RNA, 23 nt, artificial
  Oligomer
gugcacuaugggacugaguaaca

SEQ ID NO: 21441 - RNA, 23 nt, artificial
  Oligomer
agugcacuaugggacugaguaac

SEQ ID NO: 21442 - RNA, 23 nt, artificial
  Oligomer
cagugcacuaugggacugaguaa

SEQ ID NO: 21443 - RNA, 23 nt, artificial
  Oligomer
ggagaaaugacuuugaaaaccug

SEQ ID NO: 21444 - RNA, 23 nt, artificial
  Oligomer
gaggaaacuugcauacagagaca

SEQ ID NO: 21445 - RNA, 23 nt, artificial
  Oligomer
agaggaaacuugcauacagagac

SEQ ID NO: 21446 - RNA, 23 nt, artificial
  Oligomer
cagaggaaacuugcauacagaga

SEQ ID NO: 21447 - RNA, 23 nt, artificial
  Oligomer
ccagaggaaacuugcauacagag

SEQ ID NO: 21448 - RNA, 23 nt, artificial
  Oligomer
accagaggaaacuugcauacaga

SEQ ID NO: 21449 - RNA, 23 nt, artificial
  Oligomer
caagcuuguccauguaauauucc

SEQ ID NO: 21450 - RNA, 23 nt, artificial
  Oligomer
acaagcuuguccauguaauauuc

SEQ ID NO: 21451 - RNA, 23 nt, artificial
  Oligomer
gacaagcuuguccauguaauauu

SEQ ID NO: 21452 - RNA, 23 nt, artificial
  Oligomer
agacaagcuuguccauguaauau

SEQ ID NO: 21453 - RNA, 23 nt, artificial
  Oligomer
uagacaagcuuguccauguaaua

SEQ ID NO: 21454 - RNA, 23 nt, artificial
  Oligomer
gcugcaacggaauuaggaagacc

SEQ ID NO: 21455 - RNA, 23 nt, artificial
  Oligomer
agcugcaacggaauuaggaagac

SEQ ID NO: 21456 - RNA, 23 nt, artificial
  Oligomer
gagcugcaacggaauuaggaaga

SEQ ID NO: 21457 - RNA, 23 nt, artificial
  Oligomer
agagcugcaacggaauuaggaag

SEQ ID NO: 21458 - RNA, 23 nt, artificial
  Oligomer
aagagcugcaacggaauuaggaa

SEQ ID NO: 21459 - RNA, 23 nt, artificial
  Oligomer
gcaacaaugagcagaccaaccua

SEQ ID NO: 21460 - RNA, 23 nt, artificial
  Oligomer
ggcaacaaugagcagaccaaccu

SEQ ID NO: 21461 - RNA, 23 nt, artificial
  Oligomer
aggcaacaaugagcagaccaacc

SEQ ID NO: 21462 - RNA, 23 nt, artificial
  Oligomer
caggcaacaaugagcagaccaac

SEQ ID NO: 21463 - RNA, 23 nt, artificial
  Oligomer
acaggcaacaaugagcagaccaa

SEQ ID NO: 21464 - RNA, 23 nt, artificial
  Oligomer
agcugugaaagaaccaaaagaga

SEQ ID NO: 21465 - RNA, 23 nt, artificial
  Oligomer
aagcugugaaagaaccaaaagag

SEQ ID NO: 21466 - RNA, 23 nt, artificial
  Oligomer
gaagcugugaaagaaccaaaaga

SEQ ID NO: 21467 - RNA, 23 nt, artificial
  Oligomer
ggaagcugugaaagaaccaaaag

SEQ ID NO: 21468 - RNA, 23 nt, artificial
  Oligomer
gggaagcugugaaagaaccaaaa

SEQ ID NO: 21469 - RNA, 23 nt, artificial
  Oligomer
ggaaauggaagaagaagaagcgg

SEQ ID NO: 21470 - RNA, 23 nt, artificial
  Oligomer
uggaaauggaagaagaagaagcg

SEQ ID NO: 21471 - RNA, 23 nt, artificial
  Oligomer
auggaaauggaagaagaagaagc

SEQ ID NO: 21472 - RNA, 23 nt, artificial
  Oligomer
uauggaaauggaagaagaagaag

SEQ ID NO: 21473 - RNA, 23 nt, artificial
  Oligomer
cuauggaaauggaagaagaagaa

SEQ ID NO: 21474 - RNA, 23 nt, artificial
  Oligomer
ucuauggaaauggaagaagaaga

SEQ ID NO: 21475 - RNA, 23 nt, artificial
  Oligomer
uucuauggaaauggaagaagaag

SEQ ID NO: 21476 - RNA, 23 nt, artificial
  Oligomer
auucuauggaaauggaagaagaa

SEQ ID NO: 21477 - RNA, 23 nt, artificial
  Oligomer
aauucuauggaaauggaagaaga

SEQ ID NO: 21478 - RNA, 23 nt, artificial
  Oligomer
agagaggaagagcugcaacggaa

SEQ ID NO: 21479 - RNA, 23 nt, artificial
  Oligomer
ccuugauaaugggaugaauggaa

SEQ ID NO: 21480 - RNA, 23 nt, artificial
  Oligomer
accuugauaaugggaugaaugga

SEQ ID NO: 21481 - RNA, 23 nt, artificial
  Oligomer
caccuugauaaugggaugaaugg

SEQ ID NO: 21482 - RNA, 23 nt, artificial
  Oligomer
ucaccuugauaaugggaugaaug

SEQ ID NO: 21483 - RNA, 23 nt, artificial
  Oligomer
aucaccuugauaaugggaugaau

SEQ ID NO: 21484 - RNA, 23 nt, artificial
  Oligomer
caaugagcagaccaaccuaaauu

SEQ ID NO: 21485 - RNA, 23 nt, artificial
  Oligomer
acaaugagcagaccaaccuaaau

SEQ ID NO: 21486 - RNA, 23 nt, artificial
  Oligomer
aacaaugagcagaccaaccuaaa

SEQ ID NO: 21487 - RNA, 23 nt, artificial
  Oligomer
caacaaugagcagaccaaccuaa

SEQ ID NO: 21488 - RNA, 23 nt, artificial
  Oligomer
cugucuaauucuauggaaaugga

SEQ ID NO: 21489 - RNA, 23 nt, artificial
  Oligomer
ucugucuaauucuauggaaaugg

SEQ ID NO: 21490 - RNA, 23 nt, artificial
  Oligomer
uucugucuaauucuauggaaaug

SEQ ID NO: 21491 - RNA, 23 nt, artificial
  Oligomer
uuucugucuaauucuauggaaau

SEQ ID NO: 21492 - RNA, 23 nt, artificial
  Oligomer
uuuucugucuaauucuauggaaa

SEQ ID NO: 21493 - RNA, 23 nt, artificial
  Oligomer
ucaagauaaugucacagaacugu

SEQ ID NO: 21494 - RNA, 23 nt, artificial
  Oligomer
cucaagauaaugucacagaacug

SEQ ID NO: 21495 - RNA, 23 nt, artificial
  Oligomer
ucucaagauaaugucacagaacu

SEQ ID NO: 21496 - RNA, 23 nt, artificial
  Oligomer
aucucaagauaaugucacagaac

SEQ ID NO: 21497 - RNA, 23 nt, artificial
  Oligomer
aaucucaagauaaugucacagaa

SEQ ID NO: 21498 - RNA, 23 nt, artificial
  Oligomer
gaugauuguuuuugcucaaggca

SEQ ID NO: 21499 - RNA, 23 nt, artificial
  Oligomer
ggaugauuguuuuugcucaaggc

SEQ ID NO: 21500 - RNA, 23 nt, artificial
  Oligomer
uggaugauuguuuuugcucaagg

SEQ ID NO: 21501 - RNA, 23 nt, artificial
  Oligomer
uuggaugauuguuuuugcucaag

SEQ ID NO: 21502 - RNA, 23 nt, artificial
  Oligomer
guuggaugauuguuuuugcucaa

SEQ ID NO: 21503 - RNA, 23 nt, artificial
  Oligomer
gauggauagucuguccaaaugga

SEQ ID NO: 21504 - RNA, 23 nt, artificial
  Oligomer
agauggauagucuguccaaaugg

SEQ ID NO: 21505 - RNA, 23 nt, artificial
  Oligomer
cagauggauagucuguccaaaug

SEQ ID NO: 21506 - RNA, 23 nt, artificial
  Oligomer
acagauggauagucuguccaaau

SEQ ID NO: 21507 - RNA, 23 nt, artificial
  Oligomer
aacagauggauagucuguccaaa

SEQ ID NO: 21508 - RNA, 23 nt, artificial
  Oligomer
ccaucaacaagucuugaaacaag

SEQ ID NO: 21509 - RNA, 23 nt, artificial
  Oligomer
cccaucaacaagucuugaaacaa

SEQ ID NO: 21510 - RNA, 23 nt, artificial
  Oligomer
ccccaucaacaagucuugaaaca

SEQ ID NO: 21511 - RNA, 23 nt, artificial
  Oligomer
accccaucaacaagucuugaaac

SEQ ID NO: 21512 - RNA, 23 nt, artificial
  Oligomer
caccccaucaacaagucuugaaa

SEQ ID NO: 21513 - RNA, 23 nt, artificial
  Oligomer
ggaaauuaggagaggcagagaua

SEQ ID NO: 21514 - RNA, 23 nt, artificial
  Oligomer
gggaaauuaggagaggcagagau

SEQ ID NO: 21515 - RNA, 23 nt, artificial
  Oligomer
ggggaaauuaggagaggcagaga

SEQ ID NO: 21516 - RNA, 23 nt, artificial
  Oligomer
uggggaaauuaggagaggcagag

SEQ ID NO: 21517 - RNA, 23 nt, artificial
  Oligomer
uuggggaaauuaggagaggcaga

SEQ ID NO: 21518 - RNA, 23 nt, artificial
  Oligomer
accugugacuaaacaacuaccuc

SEQ ID NO: 21519 - RNA, 23 nt, artificial
  Oligomer
uaccugugacuaaacaacuaccu

SEQ ID NO: 21520 - RNA, 23 nt, artificial
  Oligomer
guaccugugacuaaacaacuacc

SEQ ID NO: 21521 - RNA, 23 nt, artificial
  Oligomer
uguaccugugacuaaacaacuac

SEQ ID NO: 21522 - RNA, 23 nt, artificial
  Oligomer
guguaccugugacuaaacaacua

SEQ ID NO: 21523 - RNA, 23 nt, artificial
  Oligomer
auggcucaugaccuggaaauaaa

SEQ ID NO: 21524 - RNA, 23 nt, artificial
  Oligomer
ccacaggaaugauucgcauccac

SEQ ID NO: 21525 - RNA, 23 nt, artificial
  Oligomer
cccacaggaaugauucgcaucca

SEQ ID NO: 21526 - RNA, 23 nt, artificial
  Oligomer
gcccacaggaaugauucgcaucc

SEQ ID NO: 21527 - RNA, 23 nt, artificial
  Oligomer
agcccacaggaaugauucgcauc

SEQ ID NO: 21528 - RNA, 23 nt, artificial
  Oligomer
aagcccacaggaaugauucgcau

SEQ ID NO: 21529 - RNA, 23 nt, artificial
  Oligomer
caauuugcaaacucucaaaacca

SEQ ID NO: 21530 - RNA, 23 nt, artificial
  Oligomer
ccaauuugcaaacucucaaaacc

SEQ ID NO: 21531 - RNA, 23 nt, artificial
  Oligomer
gccaauuugcaaacucucaaaac

SEQ ID NO: 21532 - RNA, 23 nt, artificial
  Oligomer
ugccaauuugcaaacucucaaaa

SEQ ID NO: 21533 - RNA, 23 nt, artificial
  Oligomer
augccaauuugcaaacucucaaa

SEQ ID NO: 21534 - RNA, 23 nt, artificial
  Oligomer
cgacaaaagugauacauguuuuu

SEQ ID NO: 21535 - RNA, 23 nt, artificial
  Oligomer
gcgacaaaagugauacauguuuu

SEQ ID NO: 21536 - RNA, 23 nt, artificial
  Oligomer
ugcgacaaaagugauacauguuu

SEQ ID NO: 21537 - RNA, 23 nt, artificial
  Oligomer
augcgacaaaagugauacauguu

SEQ ID NO: 21538 - RNA, 23 nt, artificial
  Oligomer
caugcgacaaaagugauacaugu

SEQ ID NO: 21539 - RNA, 23 nt, artificial
  Oligomer
gaagagagugaacagaccaagaa

SEQ ID NO: 21540 - RNA, 23 nt, artificial
  Oligomer
ggaagagagugaacagaccaaga

SEQ ID NO: 21541 - RNA, 23 nt, artificial
  Oligomer
aguuggaugauuguuuuugcuca

SEQ ID NO: 21542 - RNA, 23 nt, artificial
  Oligomer
caagcuuauuucaaugagacugc

SEQ ID NO: 21543 - RNA, 23 nt, artificial
  Oligomer
ucaagcuuauuucaaugagacug

SEQ ID NO: 21544 - RNA, 23 nt, artificial
  Oligomer
uucaagcuuauuucaaugagacu

SEQ ID NO: 21545 - RNA, 23 nt, artificial
  Oligomer
auucaagcuuauuucaaugagac

SEQ ID NO: 21546 - RNA, 23 nt, artificial
  Oligomer
gauucaagcuuauuucaaugaga

SEQ ID NO: 21547 - RNA, 23 nt, artificial
  Oligomer
ccagcuuaauggcucaugaccug

SEQ ID NO: 21548 - RNA, 23 nt, artificial
  Oligomer
cccagcuuaauggcucaugaccu

SEQ ID NO: 21549 - RNA, 23 nt, artificial
  Oligomer
gcccagcuuaauggcucaugacc

SEQ ID NO: 21550 - RNA, 23 nt, artificial
  Oligomer
agcccagcuuaauggcucaugac

SEQ ID NO: 21551 - RNA, 23 nt, artificial
  Oligomer
aagcccagcuuaauggcucauga

SEQ ID NO: 21552 - RNA, 23 nt, artificial
  Oligomer
ggagagggaagagagugaacaga

SEQ ID NO: 21553 - RNA, 23 nt, artificial
  Oligomer
uggagagggaagagagugaacag

SEQ ID NO: 21554 - RNA, 23 nt, artificial
  Oligomer
auggagagggaagagagugaaca

SEQ ID NO: 21555 - RNA, 23 nt, artificial
  Oligomer
aauggagagggaagagagugaac

SEQ ID NO: 21556 - RNA, 23 nt, artificial
  Oligomer
caauggagagggaagagagugaa

SEQ ID NO: 21557 - RNA, 23 nt, artificial
  Oligomer
gccucgcaacucuuauaaaugug

SEQ ID NO: 21558 - RNA, 23 nt, artificial
  Oligomer
ggccucgcaacucuuauaaaugu

SEQ ID NO: 21559 - RNA, 23 nt, artificial
  Oligomer
cggccucgcaacucuuauaaaug

SEQ ID NO: 21560 - RNA, 23 nt, artificial
  Oligomer
gcggccucgcaacucuuauaaau

SEQ ID NO: 21561 - RNA, 23 nt, artificial
  Oligomer
agcggccucgcaacucuuauaaa

SEQ ID NO: 21562 - RNA, 23 nt, artificial
  Oligomer
cacaaaaagcccacaggaaugau

SEQ ID NO: 21563 - RNA, 23 nt, artificial
  Oligomer
ucacaaaaagcccacaggaauga

SEQ ID NO: 21564 - RNA, 23 nt, artificial
  Oligomer
aucacaaaaagcccacaggaaug

SEQ ID NO: 21565 - RNA, 23 nt, artificial
  Oligomer
caucacaaaaagcccacaggaau

SEQ ID NO: 21566 - RNA, 23 nt, artificial
  Oligomer
ccaucacaaaaagcccacaggaa

SEQ ID NO: 21567 - RNA, 23 nt, artificial
  Oligomer
auacugggagaaaugacuuugaa

SEQ ID NO: 21568 - RNA, 23 nt, artificial
  Oligomer
ggaagaccaagacacagaucacc

SEQ ID NO: 21569 - RNA, 23 nt, artificial
  Oligomer
aggaagaccaagacacagaucac

SEQ ID NO: 21570 - RNA, 23 nt, artificial
  Oligomer
uaggaagaccaagacacagauca

SEQ ID NO: 21571 - RNA, 23 nt, artificial
  Oligomer
uuaggaagaccaagacacagauc

SEQ ID NO: 21572 - RNA, 23 nt, artificial
  Oligomer
auuaggaagaccaagacacagau

SEQ ID NO: 21573 - RNA, 23 nt, artificial
  Oligomer
gaaccuggagccacuucuaucug

SEQ ID NO: 21574 - RNA, 23 nt, artificial
  Oligomer
agaaccuggagccacuucuaucu

SEQ ID NO: 21575 - RNA, 23 nt, artificial
  Oligomer
uagaaccuggagccacuucuauc

SEQ ID NO: 21576 - RNA, 23 nt, artificial
  Oligomer
auagaaccuggagccacuucuau

SEQ ID NO: 21577 - RNA, 23 nt, artificial
  Oligomer
gauagaaccuggagccacuucua

SEQ ID NO: 21578 - RNA, 23 nt, artificial
  Oligomer
gugaacagaccaagaaaagagaa

SEQ ID NO: 21579 - RNA, 23 nt, artificial
  Oligomer
agugaacagaccaagaaaagaga

SEQ ID NO: 21580 - RNA, 23 nt, artificial
  Oligomer
cagucaaccugaaauaguaccaa

SEQ ID NO: 21581 - RNA, 23 nt, artificial
  Oligomer
ucagucaaccugaaauaguacca

SEQ ID NO: 21582 - RNA, 23 nt, artificial
  Oligomer
uucagucaaccugaaauaguacc

SEQ ID NO: 21583 - RNA, 23 nt, artificial
  Oligomer
cuucagucaaccugaaauaguac

SEQ ID NO: 21584 - RNA, 23 nt, artificial
  Oligomer
acuucagucaaccugaaauagua

SEQ ID NO: 21585 - RNA, 23 nt, artificial
  Oligomer
caguguucauuccaaguauaugg

SEQ ID NO: 21586 - RNA, 23 nt, artificial
  Oligomer
acaguguucauuccaaguauaug

SEQ ID NO: 21587 - RNA, 23 nt, artificial
  Oligomer
gacaguguucauuccaaguauau

SEQ ID NO: 21588 - RNA, 23 nt, artificial
  Oligomer
ugacaguguucauuccaaguaua

SEQ ID NO: 21589 - RNA, 23 nt, artificial
  Oligomer
uugacaguguucauuccaaguau

SEQ ID NO: 21590 - RNA, 23 nt, artificial
  Oligomer
aagcggccucgcaacucuuauaa

SEQ ID NO: 21591 - RNA, 23 nt, artificial
  Oligomer
gaagcggccucgcaacucuuaua

SEQ ID NO: 21592 - RNA, 23 nt, artificial
  Oligomer
cgagcaauaugaccaucuucugu

SEQ ID NO: 21593 - RNA, 23 nt, artificial
  Oligomer
acgagcaauaugaccaucuucug

SEQ ID NO: 21594 - RNA, 23 nt, artificial
  Oligomer
uacgagcaauaugaccaucuucu

SEQ ID NO: 21595 - RNA, 23 nt, artificial
  Oligomer
uuacgagcaauaugaccaucuuc

SEQ ID NO: 21596 - RNA, 23 nt, artificial
  Oligomer
guuacgagcaauaugaccaucuu

SEQ ID NO: 21597 - RNA, 23 nt, artificial
  Oligomer
uguuaugcagaaaucucaagaua

SEQ ID NO: 21598 - RNA, 23 nt, artificial
  Oligomer
guguuaugcagaaaucucaagau

SEQ ID NO: 21599 - RNA, 23 nt, artificial
  Oligomer
gguguuaugcagaaaucucaaga

SEQ ID NO: 21600 - RNA, 23 nt, artificial
  Oligomer
ugguguuaugcagaaaucucaag

SEQ ID NO: 21601 - RNA, 23 nt, artificial
  Oligomer
augguguuaugcagaaaucucaa

SEQ ID NO: 21602 - RNA, 23 nt, artificial
  Oligomer
gaagaugaguguuuugcuaagaa

SEQ ID NO: 21603 - RNA, 23 nt, artificial
  Oligomer
agaagaugaguguuuugcuaaga

SEQ ID NO: 21604 - RNA, 23 nt, artificial
  Oligomer
aagaagaugaguguuuugcuaag

SEQ ID NO: 21605 - RNA, 23 nt, artificial
  Oligomer
uaagaagaugaguguuuugcuaa

SEQ ID NO: 21606 - RNA, 23 nt, artificial
  Oligomer
cuaagaagaugaguguuuugcua

SEQ ID NO: 21607 - RNA, 23 nt, artificial
  Oligomer
gucucugcccaaacauaaagaga

SEQ ID NO: 21608 - RNA, 23 nt, artificial
  Oligomer
agucucugcccaaacauaaagag

SEQ ID NO: 21609 - RNA, 23 nt, artificial
  Oligomer
cagucucugcccaaacauaaaga

SEQ ID NO: 21610 - RNA, 23 nt, artificial
  Oligomer
gcagucucugcccaaacauaaag

SEQ ID NO: 21611 - RNA, 23 nt, artificial
  Oligomer
ggcagucucugcccaaacauaaa

SEQ ID NO: 21612 - RNA, 23 nt, artificial
  Oligomer
gagagaggaagagcugcaacgga

SEQ ID NO: 21613 - RNA, 23 nt, artificial
  Oligomer
ugagagaggaagagcugcaacgg

SEQ ID NO: 21614 - RNA, 23 nt, artificial
  Oligomer
cugagagaggaagagcugcaacg

SEQ ID NO: 21615 - RNA, 23 nt, artificial
  Oligomer
gcugagagaggaagagcugcaac

SEQ ID NO: 21616 - RNA, 23 nt, artificial
  Oligomer
ggcugagagaggaagagcugcaa

SEQ ID NO: 21617 - RNA, 23 nt, artificial
  Oligomer
caugccaauuugcaaacucucaa

SEQ ID NO: 21618 - RNA, 23 nt, artificial
  Oligomer
gaacccuguuucucuugaagaac

SEQ ID NO: 21619 - RNA, 23 nt, artificial
  Oligomer
ugaacccuguuucucuugaagaa

SEQ ID NO: 21620 - RNA, 23 nt, artificial
  Oligomer
gugaacccuguuucucuugaaga

SEQ ID NO: 21621 - RNA, 23 nt, artificial
  Oligomer
ugugaacccuguuucucuugaag

SEQ ID NO: 21622 - RNA, 23 nt, artificial
  Oligomer
uugugaacccuguuucucuugaa

SEQ ID NO: 21623 - RNA, 23 nt, artificial
  Oligomer
cuaagaaccaagaauucaacuau

SEQ ID NO: 21624 - RNA, 23 nt, artificial
  Oligomer
gcuaagaaccaagaauucaacua

SEQ ID NO: 21625 - RNA, 23 nt, artificial
  Oligomer
ugcuaagaaccaagaauucaacu

SEQ ID NO: 21626 - RNA, 23 nt, artificial
  Oligomer
uugcuaagaaccaagaauucaac

SEQ ID NO: 21627 - RNA, 23 nt, artificial
  Oligomer
uuugcuaagaaccaagaauucaa

SEQ ID NO: 21628 - RNA, 23 nt, artificial
  Oligomer
ccaccagaugaauucugaacugu

SEQ ID NO: 21629 - RNA, 23 nt, artificial
  Oligomer
uccaccagaugaauucugaacug

SEQ ID NO: 21630 - RNA, 23 nt, artificial
  Oligomer
auccaccagaugaauucugaacu

SEQ ID NO: 21631 - RNA, 23 nt, artificial
  Oligomer
cauccaccagaugaauucugaac

SEQ ID NO: 21632 - RNA, 23 nt, artificial
  Oligomer
gcauccaccagaugaauucugaa

SEQ ID NO: 21633 - RNA, 23 nt, artificial
  Oligomer
gcauacagagacagauauacugg

SEQ ID NO: 21634 - RNA, 23 nt, artificial
  Oligomer
ugcauacagagacagauauacug

SEQ ID NO: 21635 - RNA, 23 nt, artificial
  Oligomer
uugcauacagagacagauauacu

SEQ ID NO: 21636 - RNA, 23 nt, artificial
  Oligomer
cuugcauacagagacagauauac

SEQ ID NO: 21637 - RNA, 23 nt, artificial
  Oligomer
acuugcauacagagacagauaua

SEQ ID NO: 21638 - RNA, 23 nt, artificial
  Oligomer
gcaaacucucaaaaccaaagccu

SEQ ID NO: 21639 - RNA, 23 nt, artificial
  Oligomer
ugcaaacucucaaaaccaaagcc

SEQ ID NO: 21640 - RNA, 23 nt, artificial
  Oligomer
uugcaaacucucaaaaccaaagc

SEQ ID NO: 21641 - RNA, 23 nt, artificial
  Oligomer
uuugcaaacucucaaaaccaaag

SEQ ID NO: 21642 - RNA, 23 nt, artificial
  Oligomer
auuugcaaacucucaaaaccaaa

SEQ ID NO: 21643 - RNA, 23 nt, artificial
  Oligomer
agaacugaauaaacaggaaaaug

SEQ ID NO: 21644 - RNA, 23 nt, artificial
  Oligomer
gagaacugaauaaacaggaaaau

SEQ ID NO: 21645 - RNA, 23 nt, artificial
  Oligomer
agagaacugaauaaacaggaaaa

SEQ ID NO: 21646 - RNA, 23 nt, artificial
  Oligomer
gagagaacugaauaaacaggaaa

SEQ ID NO: 21647 - RNA, 23 nt, artificial
  Oligomer
auaguggagagaacugaauaaac

SEQ ID NO: 21648 - RNA, 23 nt, artificial
  Oligomer
ccucugucagggucaguaaggaa

SEQ ID NO: 21649 - RNA, 23 nt, artificial
  Oligomer
cccucugucagggucaguaagga

SEQ ID NO: 21650 - RNA, 23 nt, artificial
  Oligomer
ucccucugucagggucaguaagg

SEQ ID NO: 21651 - RNA, 23 nt, artificial
  Oligomer
aucccucugucagggucaguaag

SEQ ID NO: 21652 - RNA, 23 nt, artificial
  Oligomer
caucccucugucagggucaguaa

SEQ ID NO: 21653 - RNA, 23 nt, artificial
  Oligomer
gugugauuacuaugcucuagaga

SEQ ID NO: 21654 - RNA, 23 nt, artificial
  Oligomer
agugugauuacuaugcucuagag

SEQ ID NO: 21655 - RNA, 23 nt, artificial
  Oligomer
uagugugauuacuaugcucuaga

SEQ ID NO: 21656 - RNA, 23 nt, artificial
  Oligomer
auagugugauuacuaugcucuag

SEQ ID NO: 21657 - RNA, 23 nt, artificial
  Oligomer
aauagugugauuacuaugcucua

SEQ ID NO: 21658 - RNA, 23 nt, artificial
  Oligomer
agagaucuauguacuguaauagu

SEQ ID NO: 21659 - RNA, 23 nt, artificial
  Oligomer
uagagaucuauguacuguaauag

SEQ ID NO: 21660 - RNA, 23 nt, artificial
  Oligomer
auagagaucuauguacuguaaua

SEQ ID NO: 21661 - RNA, 23 nt, artificial
  Oligomer
cauagagaucuauguacuguaau

SEQ ID NO: 21662 - RNA, 23 nt, artificial
  Oligomer
acauagagaucuauguacuguaa

SEQ ID NO: 21663 - RNA, 23 nt, artificial
  Oligomer
ccaucuucuguauucuggaaacu

SEQ ID NO: 21664 - RNA, 23 nt, artificial
  Oligomer
accaucuucuguauucuggaaac

SEQ ID NO: 21665 - RNA, 23 nt, artificial
  Oligomer
gaccaucuucuguauucuggaaa

SEQ ID NO: 21666 - RNA, 23 nt, artificial
  Oligomer
ugaccaucuucuguauucuggaa

SEQ ID NO: 21667 - RNA, 23 nt, artificial
  Oligomer
augaccaucuucuguauucugga

SEQ ID NO: 21668 - RNA, 23 nt, artificial
  Oligomer
gaugaauucugaacugucagugc

SEQ ID NO: 21669 - RNA, 23 nt, artificial
  Oligomer
agaugaauucugaacugucagug

SEQ ID NO: 21670 - RNA, 23 nt, artificial
  Oligomer
cagaugaauucugaacugucagu

SEQ ID NO: 21671 - RNA, 23 nt, artificial
  Oligomer
ccagaugaauucugaacugucag

SEQ ID NO: 21672 - RNA, 23 nt, artificial
  Oligomer
accagaugaauucugaacuguca

SEQ ID NO: 21673 - RNA, 23 nt, artificial
  Oligomer
ugagguauacuuaggcaaagaga

SEQ ID NO: 21674 - RNA, 23 nt, artificial
  Oligomer
augagguauacuuaggcaaagag

SEQ ID NO: 21675 - RNA, 23 nt, artificial
  Oligomer
aaugagguauacuuaggcaaaga

SEQ ID NO: 21676 - RNA, 23 nt, artificial
  Oligomer
gaaugagguauacuuaggcaaag

SEQ ID NO: 21677 - RNA, 23 nt, artificial
  Oligomer
ugaaugagguauacuuaggcaaa

SEQ ID NO: 21678 - RNA, 23 nt, artificial
  Oligomer
gggcagucucugcccaaacauaa

SEQ ID NO: 21679 - RNA, 23 nt, artificial
  Oligomer
ggggcagucucugcccaaacaua

SEQ ID NO: 21680 - RNA, 23 nt, artificial
  Oligomer
acggaauuaggaagaccaagaca

SEQ ID NO: 21681 - RNA, 23 nt, artificial
  Oligomer
aacggaauuaggaagaccaagac

SEQ ID NO: 21682 - RNA, 23 nt, artificial
  Oligomer
caacggaauuaggaagaccaaga

SEQ ID NO: 21683 - RNA, 23 nt, artificial
  Oligomer
gcaacggaauuaggaagaccaag

SEQ ID NO: 21684 - RNA, 23 nt, artificial
  Oligomer
ugcaacggaauuaggaagaccaa

SEQ ID NO: 21685 - RNA, 23 nt, artificial
  Oligomer
ucagggucaguaaggaaaacggu

SEQ ID NO: 21686 - RNA, 23 nt, artificial
  Oligomer
gucagggucaguaaggaaaacgg

SEQ ID NO: 21687 - RNA, 23 nt, artificial
  Oligomer
ugucagggucaguaaggaaaacg

SEQ ID NO: 21688 - RNA, 23 nt, artificial
  Oligomer
cugucagggucaguaaggaaaac

SEQ ID NO: 21689 - RNA, 23 nt, artificial
  Oligomer
ucugucagggucaguaaggaaaa

SEQ ID NO: 21690 - RNA, 23 nt, artificial
  Oligomer
gggacuuauguauuuaugaccuu

SEQ ID NO: 21691 - RNA, 23 nt, artificial
  Oligomer
ugggacuuauguauuuaugaccu

SEQ ID NO: 21692 - RNA, 23 nt, artificial
  Oligomer
gugggacuuauguauuuaugacc

SEQ ID NO: 21693 - RNA, 23 nt, artificial
  Oligomer
ggugggacuuauguauuuaugac

SEQ ID NO: 21694 - RNA, 23 nt, artificial
  Oligomer
gggugggacuuauguauuuauga

SEQ ID NO: 21695 - RNA, 23 nt, artificial
  Oligomer
ccaagaauucaacuaucgaguau

SEQ ID NO: 21696 - RNA, 23 nt, artificial
  Oligomer
accaagaauucaacuaucgagua

SEQ ID NO: 21697 - RNA, 23 nt, artificial
  Oligomer
aaccaagaauucaacuaucgagu

SEQ ID NO: 21698 - RNA, 23 nt, artificial
  Oligomer
gaaccaagaauucaacuaucgag

SEQ ID NO: 21699 - RNA, 23 nt, artificial
  Oligomer
agaaccaagaauucaacuaucga

SEQ ID NO: 21700 - RNA, 23 nt, artificial
  Oligomer
gugaaagaaccaaaagagaucac

SEQ ID NO: 21701 - RNA, 23 nt, artificial
  Oligomer
ugugaaagaaccaaaagagauca

SEQ ID NO: 21702 - RNA, 23 nt, artificial
  Oligomer
cugugaaagaaccaaaagagauc

SEQ ID NO: 21703 - RNA, 23 nt, artificial
  Oligomer
gcugugaaagaaccaaaagagau

SEQ ID NO: 21704 - RNA, 23 nt, artificial
  Oligomer
cccuguuucucuugaagaacuga

SEQ ID NO: 21705 - RNA, 23 nt, artificial
  Oligomer
acccuguuucucuugaagaacug

SEQ ID NO: 21706 - RNA, 23 nt, artificial
  Oligomer
aacccuguuucucuugaagaacu

SEQ ID NO: 21707 - RNA, 23 nt, artificial
  Oligomer
ggcagagauagaaccuggagcca

SEQ ID NO: 21708 - RNA, 23 nt, artificial
  Oligomer
aggcagagauagaaccuggagcc

SEQ ID NO: 21709 - RNA, 23 nt, artificial
  Oligomer
gaggcagagauagaaccuggagc

SEQ ID NO: 21710 - RNA, 23 nt, artificial
  Oligomer
agaggcagagauagaaccuggag

SEQ ID NO: 21711 - RNA, 23 nt, artificial
  Oligomer
gagaggcagagauagaaccugga

SEQ ID NO: 21712 - RNA, 23 nt, artificial
  Oligomer
aggagaggcagagauagaaccug

SEQ ID NO: 21713 - RNA, 23 nt, artificial
  Oligomer
uaggagaggcagagauagaaccu

SEQ ID NO: 21714 - RNA, 23 nt, artificial
  Oligomer
uuaggagaggcagagauagaacc

SEQ ID NO: 21715 - RNA, 23 nt, artificial
  Oligomer
auuaggagaggcagagauagaac

SEQ ID NO: 21716 - RNA, 23 nt, artificial
  Oligomer
aauuaggagaggcagagauagaa

SEQ ID NO: 21717 - RNA, 23 nt, artificial
  Oligomer
cccugauguuacgagcaauauga

SEQ ID NO: 21718 - RNA, 23 nt, artificial
  Oligomer
ucccugauguuacgagcaauaug

SEQ ID NO: 21719 - RNA, 23 nt, artificial
  Oligomer
uucccugauguuacgagcaauau

SEQ ID NO: 21720 - RNA, 23 nt, artificial
  Oligomer
auucccugauguuacgagcaaua

SEQ ID NO: 21721 - RNA, 23 nt, artificial
  Oligomer
cauucccugauguuacgagcaau

SEQ ID NO: 21722 - RNA, 23 nt, artificial
  Oligomer
guguuuugcuaagaaccaagaau

SEQ ID NO: 21723 - RNA, 23 nt, artificial
  Oligomer
aguguuuugcuaagaaccaagaa

SEQ ID NO: 21724 - RNA, 23 nt, artificial
  Oligomer
gaguguuuugcuaagaaccaaga

SEQ ID NO: 21725 - RNA, 23 nt, artificial
  Oligomer
ugaguguuuugcuaagaaccaag

SEQ ID NO: 21726 - RNA, 23 nt, artificial
  Oligomer
augaguguuuugcuaagaaccaa

SEQ ID NO: 21727 - RNA, 23 nt, artificial
  Oligomer
gaaugauucgcauccaccagaug

SEQ ID NO: 21728 - RNA, 23 nt, artificial
  Oligomer
ggaaugauucgcauccaccagau

SEQ ID NO: 21729 - RNA, 23 nt, artificial
  Oligomer
aggaaugauucgcauccaccaga

SEQ ID NO: 21730 - RNA, 23 nt, artificial
  Oligomer
caggaaugauucgcauccaccag

SEQ ID NO: 21731 - RNA, 23 nt, artificial
  Oligomer
acaggaaugauucgcauccacca

SEQ ID NO: 21732 - RNA, 23 nt, artificial
  Oligomer
ccacagaaauacaugaaaugucu

SEQ ID NO: 21733 - RNA, 23 nt, artificial
  Oligomer
uccacagaaauacaugaaauguc

SEQ ID NO: 21734 - RNA, 23 nt, artificial
  Oligomer
auccacagaaauacaugaaaugu

SEQ ID NO: 21735 - RNA, 23 nt, artificial
  Oligomer
gauccacagaaauacaugaaaug

SEQ ID NO: 21736 - RNA, 23 nt, artificial
  Oligomer
ugauccacagaaauacaugaaau

SEQ ID NO: 21737 - RNA, 23 nt, artificial
  Oligomer
gaaccaaaagagaucacaauacu

SEQ ID NO: 21738 - RNA, 23 nt, artificial
  Oligomer
agaaccaaaagagaucacaauac

SEQ ID NO: 21739 - RNA, 23 nt, artificial
  Oligomer
aagaaccaaaagagaucacaaua

SEQ ID NO: 21740 - RNA, 23 nt, artificial
  Oligomer
aaagaaccaaaagagaucacaau

SEQ ID NO: 21741 - RNA, 23 nt, artificial
  Oligomer
gaaagaaccaaaagagaucacaa

SEQ ID NO: 21742 - RNA, 23 nt, artificial
  Oligomer
cuaucugggcuguugcuaauauu

SEQ ID NO: 21743 - RNA, 23 nt, artificial
  Oligomer
ucuaucugggcuguugcuaauau

SEQ ID NO: 21744 - RNA, 23 nt, artificial
  Oligomer
uucuaucugggcuguugcuaaua

SEQ ID NO: 21745 - RNA, 23 nt, artificial
  Oligomer
cuucuaucugggcuguugcuaau

SEQ ID NO: 21746 - RNA, 23 nt, artificial
  Oligomer
acuucuaucugggcuguugcuaa

SEQ ID NO: 21747 - RNA, 23 nt, artificial
  Oligomer
cuugaaacauagagaucuaugua

SEQ ID NO: 21748 - RNA, 23 nt, artificial
  Oligomer
ucuugaaacauagagaucuaugu

SEQ ID NO: 21749 - RNA, 23 nt, artificial
  Oligomer
aucuugaaacauagagaucuaug

SEQ ID NO: 21750 - RNA, 23 nt, artificial
  Oligomer
uaucuugaaacauagagaucuau

SEQ ID NO: 21751 - RNA, 23 nt, artificial
  Oligomer
auaucuugaaacauagagaucua

SEQ ID NO: 21752 - RNA, 23 nt, artificial
  Oligomer
ugggugggacuuauguauuuaug

SEQ ID NO: 21753 - RNA, 23 nt, artificial
  Oligomer
cugggugggacuuauguauuuau

SEQ ID NO: 21754 - RNA, 23 nt, artificial
  Oligomer
ucugggugggacuuauguauuua

SEQ ID NO: 21755 - RNA, 23 nt, artificial
  Oligomer
gucugggugggacuuauguauuu

SEQ ID NO: 21756 - RNA, 23 nt, artificial
  Oligomer
ccaagaggagacuuuaauucucu

SEQ ID NO: 21757 - RNA, 23 nt, artificial
  Oligomer
gccaagaggagacuuuaauucuc

SEQ ID NO: 21758 - RNA, 23 nt, artificial
  Oligomer
ugccaagaggagacuuuaauucu

SEQ ID NO: 21759 - RNA, 23 nt, artificial
  Oligomer
augccaagaggagacuuuaauuc

SEQ ID NO: 21760 - RNA, 23 nt, artificial
  Oligomer
uaugccaagaggagacuuuaauu

SEQ ID NO: 21761 - RNA, 23 nt, artificial
  Oligomer
ccucgcaacucuuauaaaugugg

SEQ ID NO: 21762 - RNA, 23 nt, artificial
  Oligomer
ccugauguuacgagcaauaugac

SEQ ID NO: 21763 - RNA, 23 nt, artificial
  Oligomer
guuaugcagaaaucucaagauaa

SEQ ID NO: 21764 - RNA, 23 nt, artificial
  Oligomer
ggacaagggcuuguaucaaugua

SEQ ID NO: 21765 - RNA, 23 nt, artificial
  Oligomer
aggacaagggcuuguaucaaugu

SEQ ID NO: 21766 - RNA, 23 nt, artificial
  Oligomer
aaggacaagggcuuguaucaaug

SEQ ID NO: 21767 - RNA, 23 nt, artificial
  Oligomer
caaggacaagggcuuguaucaau

SEQ ID NO: 21768 - RNA, 23 nt, artificial
  Oligomer
ucaaggacaagggcuuguaucaa

SEQ ID NO: 21769 - RNA, 23 nt, artificial
  Oligomer
gcacaaguuuugauucggacagu

SEQ ID NO: 21770 - RNA, 23 nt, artificial
  Oligomer
cgcacaaguuuugauucggacag

SEQ ID NO: 21771 - RNA, 23 nt, artificial
  Oligomer
ccgcacaaguuuugauucggaca

SEQ ID NO: 21772 - RNA, 23 nt, artificial
  Oligomer
gccgcacaaguuuugauucggac

SEQ ID NO: 21773 - RNA, 23 nt, artificial
  Oligomer
ggccgcacaaguuuugauucgga

SEQ ID NO: 21774 - RNA, 23 nt, artificial
  Oligomer
gauaaugggaugaauggaaggag

SEQ ID NO: 21775 - RNA, 23 nt, artificial
  Oligomer
ugauaaugggaugaauggaagga

SEQ ID NO: 21776 - RNA, 23 nt, artificial
  Oligomer
uugauaaugggaugaauggaagg

SEQ ID NO: 21777 - RNA, 23 nt, artificial
  Oligomer
cuugauaaugggaugaauggaag

SEQ ID NO: 21778 - RNA, 23 nt, artificial
  Oligomer
cuuccagaaggcaaaaagacauu

SEQ ID NO: 21779 - RNA, 23 nt, artificial
  Oligomer
ucuuccagaaggcaaaaagacau

SEQ ID NO: 21780 - RNA, 23 nt, artificial
  Oligomer
uucuuccagaaggcaaaaagaca

SEQ ID NO: 21781 - RNA, 23 nt, artificial
  Oligomer
uuucuuccagaaggcaaaaagac

SEQ ID NO: 21782 - RNA, 23 nt, artificial
  Oligomer
auuucuuccagaaggcaaaaaga

SEQ ID NO: 21783 - RNA, 23 nt, artificial
  Oligomer
gaguaaagcccauacaaguauuc

SEQ ID NO: 21784 - RNA, 23 nt, artificial
  Oligomer
agaguaaagcccauacaaguauu

SEQ ID NO: 21785 - RNA, 23 nt, artificial
  Oligomer
aagaguaaagcccauacaaguau

SEQ ID NO: 21786 - RNA, 23 nt, artificial
  Oligomer
aaagaguaaagcccauacaagua

SEQ ID NO: 21787 - RNA, 23 nt, artificial
  Oligomer
uaaagaguaaagcccauacaagu

SEQ ID NO: 21788 - RNA, 23 nt, artificial
  Oligomer
caaccagaggaaacuugcauaca

SEQ ID NO: 21789 - RNA, 23 nt, artificial
  Oligomer
gcaaccagaggaaacuugcauac

SEQ ID NO: 21790 - RNA, 23 nt, artificial
  Oligomer
ggcaaccagaggaaacuugcaua

SEQ ID NO: 21791 - RNA, 23 nt, artificial
  Oligomer
aggcaaccagaggaaacuugcau

SEQ ID NO: 21792 - RNA, 23 nt, artificial
  Oligomer
aaggcaaccagaggaaacuugca

SEQ ID NO: 21793 - RNA, 23 nt, artificial
  Oligomer
agauagaaccuggagccacuucu

SEQ ID NO: 21794 - RNA, 23 nt, artificial
  Oligomer
gagauagaaccuggagccacuuc

SEQ ID NO: 21795 - RNA, 23 nt, artificial
  Oligomer
agagauagaaccuggagccacuu

SEQ ID NO: 21796 - RNA, 23 nt, artificial
  Oligomer
cagagauagaaccuggagccacu

SEQ ID NO: 21797 - RNA, 23 nt, artificial
  Oligomer
cucugaagauucaagcuuauuuc

SEQ ID NO: 21798 - RNA, 23 nt, artificial
  Oligomer
ccucugaagauucaagcuuauuu

SEQ ID NO: 21799 - RNA, 23 nt, artificial
  Oligomer
uccucugaagauucaagcuuauu

SEQ ID NO: 21800 - RNA, 23 nt, artificial
  Oligomer
cuccucugaagauucaagcuuau

SEQ ID NO: 21801 - RNA, 23 nt, artificial
  Oligomer
gcuccucugaagauucaagcuua

SEQ ID NO: 21802 - RNA, 23 nt, artificial
  Oligomer
cuggaaaacugccuuuuaucugc

SEQ ID NO: 21803 - RNA, 23 nt, artificial
  Oligomer
ucuggaaaacugccuuuuaucug

SEQ ID NO: 21804 - RNA, 23 nt, artificial
  Oligomer
uucuggaaaacugccuuuuaucu

SEQ ID NO: 21805 - RNA, 23 nt, artificial
  Oligomer
uuucuggaaaacugccuuuuauc

SEQ ID NO: 21806 - RNA, 23 nt, artificial
  Oligomer
auuucuggaaaacugccuuuuau

SEQ ID NO: 21807 - RNA, 23 nt, artificial
  Oligomer
ccagaaggcaaaaagacauuacc

SEQ ID NO: 21808 - RNA, 23 nt, artificial
  Oligomer
uccagaaggcaaaaagacauuac

SEQ ID NO: 21809 - RNA, 23 nt, artificial
  Oligomer
uuccagaaggcaaaaagacauua

SEQ ID NO: 21810 - RNA, 23 nt, artificial
  Oligomer
gaccaagaaaagagaaaaaaucc

SEQ ID NO: 21811 - RNA, 23 nt, artificial
  Oligomer
ggacccugagacuucacaaucuu

SEQ ID NO: 21812 - RNA, 23 nt, artificial
  Oligomer
uggacccugagacuucacaaucu

SEQ ID NO: 21813 - RNA, 23 nt, artificial
  Oligomer
uuggacccugagacuucacaauc

SEQ ID NO: 21814 - RNA, 23 nt, artificial
  Oligomer
guuggacccugagacuucacaau

SEQ ID NO: 21815 - RNA, 23 nt, artificial
  Oligomer
aguuggacccugagacuucacaa

SEQ ID NO: 21816 - RNA, 23 nt, artificial
  Oligomer
aaguauaugggccgcacaaguuu

SEQ ID NO: 21817 - RNA, 23 nt, artificial
  Oligomer
caaguauaugggccgcacaaguu

SEQ ID NO: 21818 - RNA, 23 nt, artificial
  Oligomer
ccaaguauaugggccgcacaagu

SEQ ID NO: 21819 - RNA, 23 nt, artificial
  Oligomer
uccaaguauaugggccgcacaag

SEQ ID NO: 21820 - RNA, 23 nt, artificial
  Oligomer
uuccaaguauaugggccgcacaa

SEQ ID NO: 21821 - RNA, 23 nt, artificial
  Oligomer
auuccaaguauaugggccgcaca

SEQ ID NO: 21822 - RNA, 23 nt, artificial
  Oligomer
ggggaagcugugaaagaaccaaa

SEQ ID NO: 21823 - RNA, 23 nt, artificial
  Oligomer
uggggaagcugugaaagaaccaa

SEQ ID NO: 21824 - RNA, 23 nt, artificial
  Oligomer
cuggggaagcugugaaagaacca

SEQ ID NO: 21825 - RNA, 23 nt, artificial
  Oligomer
ccacauuccuuggauuacagcug

SEQ ID NO: 21826 - RNA, 23 nt, artificial
  Oligomer
accacauuccuuggauuacagcu

SEQ ID NO: 21827 - RNA, 23 nt, artificial
  Oligomer
gaccacauuccuuggauuacagc

SEQ ID NO: 21828 - RNA, 23 nt, artificial
  Oligomer
agaccacauuccuuggauuacag

SEQ ID NO: 21829 - RNA, 23 nt, artificial
  Oligomer
cagaccacauuccuuggauuaca

SEQ ID NO: 21830 - RNA, 23 nt, artificial
  Oligomer
cgaguaugaugguguuaugcaga

SEQ ID NO: 21831 - RNA, 23 nt, artificial
  Oligomer
ucgaguaugaugguguuaugcag

SEQ ID NO: 21832 - RNA, 23 nt, artificial
  Oligomer
aucgaguaugaugguguuaugca

SEQ ID NO: 21833 - RNA, 23 nt, artificial
  Oligomer
uaucgaguaugaugguguuaugc

SEQ ID NO: 21834 - RNA, 23 nt, artificial
  Oligomer
cuaucgaguaugaugguguuaug

SEQ ID NO: 21835 - RNA, 23 nt, artificial
  Oligomer
guaucauccaucacaaaaagccc

SEQ ID NO: 21836 - RNA, 23 nt, artificial
  Oligomer
uguaucauccaucacaaaaagcc

SEQ ID NO: 21837 - RNA, 23 nt, artificial
  Oligomer
auguaucauccaucacaaaaagc

SEQ ID NO: 21838 - RNA, 23 nt, artificial
  Oligomer
aauguaucauccaucacaaaaag

SEQ ID NO: 21839 - RNA, 23 nt, artificial
  Oligomer
caauguaucauccaucacaaaaa

SEQ ID NO: 21840 - RNA, 23 nt, artificial
  Oligomer
aguguucauuccaaguauauggg

SEQ ID NO: 21841 - RNA, 23 nt, artificial
  Oligomer
caaggguuauagacugccaugcu

SEQ ID NO: 21842 - RNA, 23 nt, artificial
  Oligomer
ucaaggguuauagacugccaugc

SEQ ID NO: 21843 - RNA, 23 nt, artificial
  Oligomer
cucaaggguuauagacugccaug

SEQ ID NO: 21844 - RNA, 23 nt, artificial
  Oligomer
ccucaaggguuauagacugccau

SEQ ID NO: 21845 - RNA, 23 nt, artificial
  Oligomer
cccucaaggguuauagacugcca

SEQ ID NO: 21846 - RNA, 23 nt, artificial
  Oligomer
cuagcaaauuugaguuggaugau

SEQ ID NO: 21847 - RNA, 23 nt, artificial
  Oligomer
gcuagcaaauuugaguuggauga

SEQ ID NO: 21848 - RNA, 23 nt, artificial
  Oligomer
ggcuagcaaauuugaguuggaug

SEQ ID NO: 21849 - RNA, 23 nt, artificial
  Oligomer
gggcuagcaaauuugaguuggau

SEQ ID NO: 21850 - RNA, 23 nt, artificial
  Oligomer
agggcuagcaaauuugaguugga

SEQ ID NO: 21851 - RNA, 23 nt, artificial
  Oligomer
uuaaagaguaaagcccauacaag

SEQ ID NO: 21852 - RNA, 23 nt, artificial
  Oligomer
auuaaagaguaaagcccauacaa

SEQ ID NO: 21853 - RNA, 23 nt, artificial
  Oligomer
acaucuucaugcgacaaaaguga

SEQ ID NO: 21854 - RNA, 23 nt, artificial
  Oligomer
gacaucuucaugcgacaaaagug

SEQ ID NO: 21855 - RNA, 23 nt, artificial
  Oligomer
agacaucuucaugcgacaaaagu

SEQ ID NO: 21856 - RNA, 23 nt, artificial
  Oligomer
aagacaucuucaugcgacaaaag

SEQ ID NO: 21857 - RNA, 23 nt, artificial
  Oligomer
gaagacaucuucaugcgacaaaa

SEQ ID NO: 21858 - RNA, 23 nt, artificial
  Oligomer
gcccagcguguuuuuaaaaguuc

SEQ ID NO: 21859 - RNA, 23 nt, artificial
  Oligomer
ccauauaccugaaagaucugaug

SEQ ID NO: 21860 - RNA, 23 nt, artificial
  Oligomer
uccauauaccugaaagaucugau

SEQ ID NO: 21861 - RNA, 23 nt, artificial
  Oligomer
auccauauaccugaaagaucuga

SEQ ID NO: 21862 - RNA, 23 nt, artificial
  Oligomer
aauccauauaccugaaagaucug

SEQ ID NO: 21863 - RNA, 23 nt, artificial
  Oligomer
aaauccauauaccugaaagaucu

SEQ ID NO: 21864 - RNA, 23 nt, artificial
  Oligomer
ugaugguguuaugcagaaaucuc

SEQ ID NO: 21865 - RNA, 23 nt, artificial
  Oligomer
augaugguguuaugcagaaaucu

SEQ ID NO: 21866 - RNA, 23 nt, artificial
  Oligomer
uaugaugguguuaugcagaaauc

SEQ ID NO: 21867 - RNA, 23 nt, artificial
  Oligomer
guaugaugguguuaugcagaaau

SEQ ID NO: 21868 - RNA, 23 nt, artificial
  Oligomer
aguaugaugguguuaugcagaaa

SEQ ID NO: 21869 - RNA, 23 nt, artificial
  Oligomer
acgguuacccagaaccuaagaag

SEQ ID NO: 21870 - RNA, 23 nt, artificial
  Oligomer
cacgguuacccagaaccuaagaa

SEQ ID NO: 21871 - RNA, 23 nt, artificial
  Oligomer
acacgguuacccagaaccuaaga

SEQ ID NO: 21872 - RNA, 23 nt, artificial
  Oligomer
uacacgguuacccagaaccuaag

SEQ ID NO: 21873 - RNA, 23 nt, artificial
  Oligomer
auacacgguuacccagaaccuaa

SEQ ID NO: 21874 - RNA, 23 nt, artificial
  Oligomer
ccugagugagcuaguaguauuuu

SEQ ID NO: 21875 - RNA, 23 nt, artificial
  Oligomer
gccugagugagcuaguaguauuu

SEQ ID NO: 21876 - RNA, 23 nt, artificial
  Oligomer
agccugagugagcuaguaguauu

SEQ ID NO: 21877 - RNA, 23 nt, artificial
  Oligomer
aagccugagugagcuaguaguau

SEQ ID NO: 21878 - RNA, 23 nt, artificial
  Oligomer
aaagccugagugagcuaguagua

SEQ ID NO: 21879 - RNA, 23 nt, artificial
  Oligomer
ggaauuaggaagaccaagacaca

SEQ ID NO: 21880 - RNA, 23 nt, artificial
  Oligomer
cggaauuaggaagaccaagacac

SEQ ID NO: 21881 - RNA, 23 nt, artificial
  Oligomer
augagcagaccaaccuaaauuug

SEQ ID NO: 21882 - RNA, 23 nt, artificial
  Oligomer
aaugagcagaccaaccuaaauuu

SEQ ID NO: 21883 - RNA, 23 nt, artificial
  Oligomer
uaaggaaaacgguggccuagggu

SEQ ID NO: 21884 - RNA, 23 nt, artificial
  Oligomer
guaaggaaaacgguggccuaggg

SEQ ID NO: 21885 - RNA, 23 nt, artificial
  Oligomer
aguaaggaaaacgguggccuagg

SEQ ID NO: 21886 - RNA, 23 nt, artificial
  Oligomer
caguaaggaaaacgguggccuag

SEQ ID NO: 21887 - RNA, 23 nt, artificial
  Oligomer
ucaguaaggaaaacgguggccua

SEQ ID NO: 21888 - RNA, 23 nt, artificial
  Oligomer
agaucagauucuucucuuaauuu

SEQ ID NO: 21889 - RNA, 23 nt, artificial
  Oligomer
cagaucagauucuucucuuaauu

SEQ ID NO: 21890 - RNA, 23 nt, artificial
  Oligomer
ccagaucagauucuucucuuaau

SEQ ID NO: 21891 - RNA, 23 nt, artificial
  Oligomer
uccagaucagauucuucucuuaa

SEQ ID NO: 21892 - RNA, 23 nt, artificial
  Oligomer
cuccagaucagauucuucucuua

SEQ ID NO: 21893 - RNA, 23 nt, artificial
  Oligomer
gguuuucugucuaauucuaugga

SEQ ID NO: 21894 - RNA, 23 nt, artificial
  Oligomer
ugguuuucugucuaauucuaugg

SEQ ID NO: 21895 - RNA, 23 nt, artificial
  Oligomer
augguuuucugucuaauucuaug

SEQ ID NO: 21896 - RNA, 23 nt, artificial
  Oligomer
gaugguuuucugucuaauucuau

SEQ ID NO: 21897 - RNA, 23 nt, artificial
  Oligomer
ugaugguuuucugucuaauucua

SEQ ID NO: 21898 - RNA, 23 nt, artificial
  Oligomer
gaaauuugacaguguucauucca

SEQ ID NO: 21899 - RNA, 23 nt, artificial
  Oligomer
agaaauuugacaguguucauucc

SEQ ID NO: 21900 - RNA, 23 nt, artificial
  Oligomer
gagaaauuugacaguguucauuc

SEQ ID NO: 21901 - RNA, 23 nt, artificial
  Oligomer
agagaaauuugacaguguucauu

SEQ ID NO: 21902 - RNA, 23 nt, artificial
  Oligomer
aagagaaauuugacaguguucau

SEQ ID NO: 21903 - RNA, 23 nt, artificial
  Oligomer
uauacuuaggcaaagagaaauuu

SEQ ID NO: 21904 - RNA, 23 nt, artificial
  Oligomer
guauacuuaggcaaagagaaauu

SEQ ID NO: 21905 - RNA, 23 nt, artificial
  Oligomer
gguauacuuaggcaaagagaaau

SEQ ID NO: 21906 - RNA, 23 nt, artificial
  Oligomer
agguauacuuaggcaaagagaaa

SEQ ID NO: 21907 - RNA, 23 nt, artificial
  Oligomer
gagguauacuuaggcaaagagaa

SEQ ID NO: 21908 - RNA, 23 nt, artificial
  Oligomer
cuugguucugaaugagguauacu

SEQ ID NO: 21909 - RNA, 23 nt, artificial
  Oligomer
acuugguucugaaugagguauac

SEQ ID NO: 21910 - RNA, 23 nt, artificial
  Oligomer
aacuugguucugaaugagguaua

SEQ ID NO: 21911 - RNA, 23 nt, artificial
  Oligomer
aaacuugguucugaaugagguau

SEQ ID NO: 21912 - RNA, 23 nt, artificial
  Oligomer
aaaacuugguucugaaugaggua

SEQ ID NO: 21913 - RNA, 23 nt, artificial
  Oligomer
guuauagacugccaugcuagaca

SEQ ID NO: 21914 - RNA, 23 nt, artificial
  Oligomer
gguuauagacugccaugcuagac

SEQ ID NO: 21915 - RNA, 23 nt, artificial
  Oligomer
ggguuauagacugccaugcuaga

SEQ ID NO: 21916 - RNA, 23 nt, artificial
  Oligomer
aggguuauagacugccaugcuag

SEQ ID NO: 21917 - RNA, 23 nt, artificial
  Oligomer
aaggguuauagacugccaugcua

SEQ ID NO: 21918 - RNA, 23 nt, artificial
  Oligomer
gaaacaagcaacagauggauagu

SEQ ID NO: 21919 - RNA, 23 nt, artificial
  Oligomer
ugaaacaagcaacagauggauag

SEQ ID NO: 21920 - RNA, 23 nt, artificial
  Oligomer
uugaaacaagcaacagauggaua

SEQ ID NO: 21921 - RNA, 23 nt, artificial
  Oligomer
cuugaaacaagcaacagauggau

SEQ ID NO: 21922 - RNA, 23 nt, artificial
  Oligomer
ucuugaaacaagcaacagaugga

SEQ ID NO: 21923 - RNA, 23 nt, artificial
  Oligomer
cuaggguacaggcaacaaugagc

SEQ ID NO: 21924 - RNA, 23 nt, artificial
  Oligomer
ccuaggguacaggcaacaaugag

SEQ ID NO: 21925 - RNA, 23 nt, artificial
  Oligomer
gccuaggguacaggcaacaauga

SEQ ID NO: 21926 - RNA, 23 nt, artificial
  Oligomer
ggccuaggguacaggcaacaaug

SEQ ID NO: 21927 - RNA, 23 nt, artificial
  Oligomer
uggccuaggguacaggcaacaau

SEQ ID NO: 21928 - RNA, 23 nt, artificial
  Oligomer
uuacuaugcucuagagaaaaguc

SEQ ID NO: 21929 - RNA, 23 nt, artificial
  Oligomer
auuacuaugcucuagagaaaagu

SEQ ID NO: 21930 - RNA, 23 nt, artificial
  Oligomer
gauuacuaugcucuagagaaaag

SEQ ID NO: 21931 - RNA, 23 nt, artificial
  Oligomer
ugauuacuaugcucuagagaaaa

SEQ ID NO: 21932 - RNA, 23 nt, artificial
  Oligomer
gugauuacuaugcucuagagaaa

SEQ ID NO: 21933 - RNA, 23 nt, artificial
  Oligomer
ccuuuuaucugcccagaauucua

SEQ ID NO: 21934 - RNA, 23 nt, artificial
  Oligomer
gccuuuuaucugcccagaauucu

SEQ ID NO: 21935 - RNA, 23 nt, artificial
  Oligomer
ugccuuuuaucugcccagaauuc

SEQ ID NO: 21936 - RNA, 23 nt, artificial
  Oligomer
cugccuuuuaucugcccagaauu

SEQ ID NO: 21937 - RNA, 23 nt, artificial
  Oligomer
acugccuuuuaucugcccagaau

SEQ ID NO: 21938 - RNA, 23 nt, artificial
  Oligomer
accugaaagaucugaugaagccc

SEQ ID NO: 21939 - RNA, 23 nt, artificial
  Oligomer
uaccugaaagaucugaugaagcc

SEQ ID NO: 21940 - RNA, 23 nt, artificial
  Oligomer
auaccugaaagaucugaugaagc

SEQ ID NO: 21941 - RNA, 23 nt, artificial
  Oligomer
uauaccugaaagaucugaugaag

SEQ ID NO: 21942 - RNA, 23 nt, artificial
  Oligomer
auauaccugaaagaucugaugaa

SEQ ID NO: 21943 - RNA, 23 nt, artificial
  Oligomer
gggaagagagugaacagaccaag

SEQ ID NO: 21944 - RNA, 23 nt, artificial
  Oligomer
agggaagagagugaacagaccaa

SEQ ID NO: 21945 - RNA, 23 nt, artificial
  Oligomer
gugaugguuuucugucuaauucu

SEQ ID NO: 21946 - RNA, 23 nt, artificial
  Oligomer
ugugaugguuuucugucuaauuc

SEQ ID NO: 21947 - RNA, 23 nt, artificial
  Oligomer
gugugaugguuuucugucuaauu

SEQ ID NO: 21948 - RNA, 23 nt, artificial
  Oligomer
ugugugaugguuuucugucuaau

SEQ ID NO: 21949 - RNA, 23 nt, artificial
  Oligomer
augugugaugguuuucugucuaa

SEQ ID NO: 21950 - RNA, 23 nt, artificial
  Oligomer
caucuucuguauucuggaaacug

SEQ ID NO: 21951 - RNA, 23 nt, artificial
  Oligomer
gcucaucuauacacgguuaccca

SEQ ID NO: 21952 - RNA, 23 nt, artificial
  Oligomer
ugcucaucuauacacgguuaccc

SEQ ID NO: 21953 - RNA, 23 nt, artificial
  Oligomer
cugcucaucuauacacgguuacc

SEQ ID NO: 21954 - RNA, 23 nt, artificial
  Oligomer
ccugcucaucuauacacgguuac

SEQ ID NO: 21955 - RNA, 23 nt, artificial
  Oligomer
accugcucaucuauacacgguua

SEQ ID NO: 21956 - RNA, 23 nt, artificial
  Oligomer
cugccaugccaauuugcaaacuc

SEQ ID NO: 21957 - RNA, 23 nt, artificial
  Oligomer
ccugccaugccaauuugcaaacu

SEQ ID NO: 21958 - RNA, 23 nt, artificial
  Oligomer
accugccaugccaauuugcaaac

SEQ ID NO: 21959 - RNA, 23 nt, artificial
  Oligomer
gaccugccaugccaauuugcaaa

SEQ ID NO: 21960 - RNA, 23 nt, artificial
  Oligomer
agaccugccaugccaauuugcaa

SEQ ID NO: 21961 - RNA, 23 nt, artificial
  Oligomer
cucugucagggucaguaaggaaa

SEQ ID NO: 21962 - RNA, 23 nt, artificial
  Oligomer
gaccaauaccuccuccagaucag

SEQ ID NO: 21963 - RNA, 23 nt, artificial
  Oligomer
ggaccaauaccuccuccagauca

SEQ ID NO: 21964 - RNA, 23 nt, artificial
  Oligomer
aggaccaauaccuccuccagauc

SEQ ID NO: 21965 - RNA, 23 nt, artificial
  Oligomer
uaggaccaauaccuccuccagau

SEQ ID NO: 21966 - RNA, 23 nt, artificial
  Oligomer
uuaggaccaauaccuccuccaga

SEQ ID NO: 21967 - RNA, 23 nt, artificial
  Oligomer
ccaacacaauggagagggaagag

SEQ ID NO: 21968 - RNA, 23 nt, artificial
  Oligomer
accaacacaauggagagggaaga

SEQ ID NO: 21969 - RNA, 23 nt, artificial
  Oligomer
aaccaacacaauggagagggaag

SEQ ID NO: 21970 - RNA, 23 nt, artificial
  Oligomer
gaaccaacacaauggagagggaa

SEQ ID NO: 21971 - RNA, 23 nt, artificial
  Oligomer
ggaaccaacacaauggagaggga

SEQ ID NO: 21972 - RNA, 23 nt, artificial
  Oligomer
cuaauucuauggaaauggaagaa

SEQ ID NO: 21973 - RNA, 23 nt, artificial
  Oligomer
ucuaauucuauggaaauggaaga

SEQ ID NO: 21974 - RNA, 23 nt, artificial
  Oligomer
gucuaauucuauggaaauggaag

SEQ ID NO: 21975 - RNA, 23 nt, artificial
  Oligomer
ugucuaauucuauggaaauggaa

SEQ ID NO: 21976 - RNA, 23 nt, artificial
  Oligomer
gauguuacgagcaauaugaccau

SEQ ID NO: 21977 - RNA, 23 nt, artificial
  Oligomer
ugauguuacgagcaauaugacca

SEQ ID NO: 21978 - RNA, 23 nt, artificial
  Oligomer
cugauguuacgagcaauaugacc

SEQ ID NO: 21979 - RNA, 23 nt, artificial
  Oligomer
gaugguguuaugcagaaaucuca

SEQ ID NO: 21980 - RNA, 23 nt, artificial
  Oligomer
caguuggacccugagacuucaca

SEQ ID NO: 21981 - RNA, 23 nt, artificial
  Oligomer
acaguuggacccugagacuucac

SEQ ID NO: 21982 - RNA, 23 nt, artificial
  Oligomer
gacaguuggacccugagacuuca

SEQ ID NO: 21983 - RNA, 23 nt, artificial
  Oligomer
auacuuaggcaaagagaaauuug

SEQ ID NO: 21984 - RNA, 23 nt, artificial
  Oligomer
cucuaaggugggaucacuaaggg

SEQ ID NO: 21985 - RNA, 23 nt, artificial
  Oligomer
gcucuaaggugggaucacuaagg

SEQ ID NO: 21986 - RNA, 23 nt, artificial
  Oligomer
ggcucuaaggugggaucacuaag

SEQ ID NO: 21987 - RNA, 23 nt, artificial
  Oligomer
uggcucuaaggugggaucacuaa

SEQ ID NO: 21988 - RNA, 23 nt, artificial
  Oligomer
cuggcucuaaggugggaucacua

SEQ ID NO: 21989 - RNA, 23 nt, artificial
  Oligomer
ggaugucaucuuccuggaagcag

SEQ ID NO: 21990 - RNA, 23 nt, artificial
  Oligomer
gggaugucaucuuccuggaagca

SEQ ID NO: 21991 - RNA, 23 nt, artificial
  Oligomer
ugggaugucaucuuccuggaagc

SEQ ID NO: 21992 - RNA, 23 nt, artificial
  Oligomer
uugggaugucaucuuccuggaag

SEQ ID NO: 21993 - RNA, 23 nt, artificial
  Oligomer
auugggaugucaucuuccuggaa

SEQ ID NO: 21994 - RNA, 23 nt, artificial
  Oligomer
caaguuauugggaugucaucuuc

SEQ ID NO: 21995 - RNA, 23 nt, artificial
  Oligomer
ccaaguuauugggaugucaucuu

SEQ ID NO: 21996 - RNA, 23 nt, artificial
  Oligomer
cccaaguuauugggaugucaucu

SEQ ID NO: 21997 - RNA, 23 nt, artificial
  Oligomer
acccaaguuauugggaugucauc

SEQ ID NO: 21998 - RNA, 23 nt, artificial
  Oligomer
uacccaaguuauugggaugucau

SEQ ID NO: 21999 - RNA, 23 nt, artificial
  Oligomer
ggaaaaugccagagcuugugaac

SEQ ID NO: 22000 - RNA, 23 nt, artificial
  Oligomer
aggaaaaugccagagcuugugaa

SEQ ID NO: 22001 - RNA, 23 nt, artificial
  Oligomer
caggaaaaugccagagcuuguga

SEQ ID NO: 22002 - RNA, 23 nt, artificial
  Oligomer
acaggaaaaugccagagcuugug

SEQ ID NO: 22003 - RNA, 23 nt, artificial
  Oligomer
aacaggaaaaugccagagcuugu

SEQ ID NO: 22004 - RNA, 23 nt, artificial
  Oligomer
gaacugaauaaacaggaaaaugc

SEQ ID NO: 22005 - RNA, 23 nt, artificial
  Oligomer
ugagcagaccaaccuaaauuugg

SEQ ID NO: 22006 - RNA, 23 nt, artificial
  Oligomer
ggcuuguaucaauguaucaucca

SEQ ID NO: 22007 - RNA, 23 nt, artificial
  Oligomer
gggcuuguaucaauguaucaucc

SEQ ID NO: 22008 - RNA, 23 nt, artificial
  Oligomer
agggcuuguaucaauguaucauc

SEQ ID NO: 22009 - RNA, 23 nt, artificial
  Oligomer
aagggcuuguaucaauguaucau

SEQ ID NO: 22010 - RNA, 23 nt, artificial
  Oligomer
caagggcuuguaucaauguauca

SEQ ID NO: 22011 - RNA, 23 nt, artificial
  Oligomer
aauuugcaaacucucaaaaccaa

SEQ ID NO: 22012 - RNA, 23 nt, artificial
  Oligomer
gggcuguugcuaauauugaggag

SEQ ID NO: 22013 - RNA, 23 nt, artificial
  Oligomer
ugggcuguugcuaauauugagga

SEQ ID NO: 22014 - RNA, 23 nt, artificial
  Oligomer
cugggcuguugcuaauauugagg

SEQ ID NO: 22015 - RNA, 23 nt, artificial
  Oligomer
ucugggcuguugcuaauauugag

SEQ ID NO: 22016 - RNA, 23 nt, artificial
  Oligomer
aucugggcuguugcuaauauuga

SEQ ID NO: 22017 - RNA, 23 nt, artificial
  Oligomer
aauggcucaugaccuggaaauaa

SEQ ID NO: 22018 - RNA, 23 nt, artificial
  Oligomer
uaauggcucaugaccuggaaaua

SEQ ID NO: 22019 - RNA, 23 nt, artificial
  Oligomer
uuaauggcucaugaccuggaaau

SEQ ID NO: 22020 - RNA, 23 nt, artificial
  Oligomer
cuuaauggcucaugaccuggaaa

SEQ ID NO: 22021 - RNA, 23 nt, artificial
  Oligomer
gcuuaauggcucaugaccuggaa

SEQ ID NO: 22022 - RNA, 23 nt, artificial
  Oligomer
caacacaauggagagggaagaga

SEQ ID NO: 22023 - RNA, 23 nt, artificial
  Oligomer
uauacacgguuacccagaaccua

SEQ ID NO: 22024 - RNA, 23 nt, artificial
  Oligomer
caaccugaaauaguaccaauuuc

SEQ ID NO: 22025 - RNA, 23 nt, artificial
  Oligomer
ucaaccugaaauaguaccaauuu

SEQ ID NO: 22026 - RNA, 23 nt, artificial
  Oligomer
gucaaccugaaauaguaccaauu

SEQ ID NO: 22027 - RNA, 23 nt, artificial
  Oligomer
agucaaccugaaauaguaccaau

SEQ ID NO: 22028 - RNA, 23 nt, artificial
  Oligomer
acaaaaagcccacaggaaugauu

SEQ ID NO: 22029 - RNA, 23 nt, artificial
  Oligomer
ugcccaaacauaaagagaacucu

SEQ ID NO: 22030 - RNA, 23 nt, artificial
  Oligomer
cugcccaaacauaaagagaacuc

SEQ ID NO: 22031 - RNA, 23 nt, artificial
  Oligomer
ucugcccaaacauaaagagaacu

SEQ ID NO: 22032 - RNA, 23 nt, artificial
  Oligomer
cucugcccaaacauaaagagaac

SEQ ID NO: 22033 - RNA, 23 nt, artificial
  Oligomer
ucucugcccaaacauaaagagaa

SEQ ID NO: 22034 - RNA, 23 nt, artificial
  Oligomer
uauacugggagaaaugacuuuga

SEQ ID NO: 22035 - RNA, 23 nt, artificial
  Oligomer
ggaaacuugcauacagagacaga

SEQ ID NO: 22036 - RNA, 23 nt, artificial
  Oligomer
aggaaacuugcauacagagacag

SEQ ID NO: 22037 - RNA, 23 nt, artificial
  Oligomer
gcauagggcuagcaaauuugagu

SEQ ID NO: 22038 - RNA, 23 nt, artificial
  Oligomer
agcauagggcuagcaaauuugag

SEQ ID NO: 22039 - RNA, 23 nt, artificial
  Oligomer
cagcauagggcuagcaaauuuga

SEQ ID NO: 22040 - RNA, 23 nt, artificial
  Oligomer
gagccaucaccuugauaauggga

SEQ ID NO: 22041 - RNA, 23 nt, artificial
  Oligomer
agagccaucaccuugauaauggg

SEQ ID NO: 22042 - RNA, 23 nt, artificial
  Oligomer
gagagccaucaccuugauaaugg

SEQ ID NO: 22043 - RNA, 23 nt, artificial
  Oligomer
ggagagccaucaccuugauaaug

SEQ ID NO: 22044 - RNA, 23 nt, artificial
  Oligomer
gggagagccaucaccuugauaau

SEQ ID NO: 22045 - RNA, 23 nt, artificial
  Oligomer
caagccauaguggagagaacuga

SEQ ID NO: 22046 - RNA, 23 nt, artificial
  Oligomer
ggucaguaaggaaaacgguggcc

SEQ ID NO: 22047 - RNA, 23 nt, artificial
  Oligomer
gggucaguaaggaaaacgguggc

SEQ ID NO: 22048 - RNA, 23 nt, artificial
  Oligomer
agggucaguaaggaaaacggugg

SEQ ID NO: 22049 - RNA, 23 nt, artificial
  Oligomer
cagggucaguaaggaaaacggug

SEQ ID NO: 22050 - RNA, 23 nt, artificial
  Oligomer
auuuuguguguaccugugacuaa

SEQ ID NO: 22051 - RNA, 23 nt, artificial
  Oligomer
guaacauucucuuugugauggcc

SEQ ID NO: 22052 - RNA, 23 nt, artificial
  Oligomer
aguaacauucucuuugugauggc

SEQ ID NO: 22053 - RNA, 23 nt, artificial
  Oligomer
gaguaacauucucuuugugaugg

SEQ ID NO: 22054 - RNA, 23 nt, artificial
  Oligomer
ugaguaacauucucuuugugaug

SEQ ID NO: 22055 - RNA, 23 nt, artificial
  Oligomer
cugaguaacauucucuuugugau

SEQ ID NO: 22056 - RNA, 23 nt, artificial
  Oligomer
gauuucuuccagaaggcaaaaag

SEQ ID NO: 22057 - RNA, 23 nt, artificial
  Oligomer
ugauuucuuccagaaggcaaaaa

SEQ ID NO: 22058 - RNA, 23 nt, artificial
  Oligomer
uugauuucuuccagaaggcaaaa

SEQ ID NO: 22059 - RNA, 23 nt, artificial
  Oligomer
uuugauuucuuccagaaggcaaa

SEQ ID NO: 22060 - RNA, 23 nt, artificial
  Oligomer
cgaagacaucuucaugcgacaaa

SEQ ID NO: 22061 - RNA, 23 nt, artificial
  Oligomer
ucgaagacaucuucaugcgacaa

SEQ ID NO: 22062 - RNA, 23 nt, artificial
  Oligomer
uucgaagacaucuucaugcgaca

SEQ ID NO: 22063 - RNA, 23 nt, artificial
  Oligomer
aaauguggaaccaacacaaugga

SEQ ID NO: 22064 - RNA, 23 nt, artificial
  Oligomer
uaaauguggaaccaacacaaugg

SEQ ID NO: 22065 - RNA, 23 nt, artificial
  Oligomer
auaaauguggaaccaacacaaug

SEQ ID NO: 22066 - RNA, 23 nt, artificial
  Oligomer
uauaaauguggaaccaacacaau

SEQ ID NO: 22067 - RNA, 23 nt, artificial
  Oligomer
uuauaaauguggaaccaacacaa

SEQ ID NO: 22068 - RNA, 23 nt, artificial
  Oligomer
gaguaugaugguguuaugcagaa

SEQ ID NO: 22069 - RNA, 23 nt, artificial
  Oligomer
ggaaaacuugguucugaaugagg

SEQ ID NO: 22070 - RNA, 23 nt, artificial
  Oligomer
ggaccaggaaaacuugguucuga

SEQ ID NO: 22071 - RNA, 23 nt, artificial
  Oligomer
gagccugagccacaaaaauguuc

SEQ ID NO: 22072 - RNA, 23 nt, artificial
  Oligomer
gcaaauuugaguuggaugauugu

SEQ ID NO: 22073 - RNA, 23 nt, artificial
  Oligomer
agcaaauuugaguuggaugauug

SEQ ID NO: 22074 - RNA, 23 nt, artificial
  Oligomer
uagcaaauuugaguuggaugauu

SEQ ID NO: 22075 - RNA, 23 nt, artificial
  Oligomer
cuugauccacagaaauacaugaa

SEQ ID NO: 22076 - RNA, 23 nt, artificial
  Oligomer
ucuugauccacagaaauacauga

SEQ ID NO: 22077 - RNA, 23 nt, artificial
  Oligomer
aucuugauccacagaaauacaug

SEQ ID NO: 22078 - RNA, 23 nt, artificial
  Oligomer
gaucuugauccacagaaauacau

SEQ ID NO: 22079 - RNA, 23 nt, artificial
  Oligomer
agaucuugauccacagaaauaca

SEQ ID NO: 22080 - RNA, 23 nt, artificial
  Oligomer
cagucugggugggacuuauguau

SEQ ID NO: 22081 - RNA, 23 nt, artificial
  Oligomer
ucagucugggugggacuuaugua

SEQ ID NO: 22082 - RNA, 23 nt, artificial
  Oligomer
cucagucugggugggacuuaugu

SEQ ID NO: 22083 - RNA, 23 nt, artificial
  Oligomer
ccucagucugggugggacuuaug

SEQ ID NO: 22084 - RNA, 23 nt, artificial
  Oligomer
uccucagucugggugggacuuau

SEQ ID NO: 22085 - RNA, 23 nt, artificial
  Oligomer
uuuugauuucuuccagaaggcaa

SEQ ID NO: 22086 - RNA, 23 nt, artificial
  Oligomer
cuaugggacugaguaacauucuc

SEQ ID NO: 22087 - RNA, 23 nt, artificial
  Oligomer
acuaugggacugaguaacauucu

SEQ ID NO: 22088 - RNA, 23 nt, artificial
  Oligomer
cacuaugggacugaguaacauuc

SEQ ID NO: 22089 - RNA, 23 nt, artificial
  Oligomer
acaauggagagggaagagaguga

SEQ ID NO: 22090 - RNA, 23 nt, artificial
  Oligomer
uggaaccaacacaauggagaggg

SEQ ID NO: 22091 - RNA, 23 nt, artificial
  Oligomer
guggaaccaacacaauggagagg

SEQ ID NO: 22092 - RNA, 23 nt, artificial
  Oligomer
uguggaaccaacacaauggagag

SEQ ID NO: 22093 - RNA, 23 nt, artificial
  Oligomer
auguggaaccaacacaauggaga

SEQ ID NO: 22094 - RNA, 23 nt, artificial
  Oligomer
gacaagacgcggcuuuuaucuuc

SEQ ID NO: 22095 - RNA, 23 nt, artificial
  Oligomer
ugacaagacgcggcuuuuaucuu

SEQ ID NO: 22096 - RNA, 23 nt, artificial
  Oligomer
cugacaagacgcggcuuuuaucu

SEQ ID NO: 22097 - RNA, 23 nt, artificial
  Oligomer
acugacaagacgcggcuuuuauc

SEQ ID NO: 22098 - RNA, 23 nt, artificial
  Oligomer
aacugacaagacgcggcuuuuau

SEQ ID NO: 22099 - RNA, 23 nt, artificial
  Oligomer
aaagcccacaggaaugauucgca

SEQ ID NO: 22100 - RNA, 23 nt, artificial
  Oligomer
uaggcaaagagaaauuugacagu

SEQ ID NO: 22101 - RNA, 23 nt, artificial
  Oligomer
uuaggcaaagagaaauuugacag

SEQ ID NO: 22102 - RNA, 23 nt, artificial
  Oligomer
cuuaggcaaagagaaauuugaca

SEQ ID NO: 22103 - RNA, 23 nt, artificial
  Oligomer
acuuaggcaaagagaaauuugac

SEQ ID NO: 22104 - RNA, 23 nt, artificial
  Oligomer
uacuuaggcaaagagaaauuuga

SEQ ID NO: 22105 - RNA, 23 nt, artificial
  Oligomer
ucugaaugagguauacuuaggca

SEQ ID NO: 22106 - RNA, 23 nt, artificial
  Oligomer
uucugaaugagguauacuuaggc

SEQ ID NO: 22107 - RNA, 23 nt, artificial
  Oligomer
guucugaaugagguauacuuagg

SEQ ID NO: 22108 - RNA, 23 nt, artificial
  Oligomer
gguucugaaugagguauacuuag

SEQ ID NO: 22109 - RNA, 23 nt, artificial
  Oligomer
ugguucugaaugagguauacuua

SEQ ID NO: 22110 - RNA, 23 nt, artificial
  Oligomer
ccacaaaaauguuccuuuauuuu

SEQ ID NO: 22111 - RNA, 23 nt, artificial
  Oligomer
gccacaaaaauguuccuuuauuu

SEQ ID NO: 22112 - RNA, 23 nt, artificial
  Oligomer
agccacaaaaauguuccuuuauu

SEQ ID NO: 22113 - RNA, 23 nt, artificial
  Oligomer
gagccacaaaaauguuccuuuau

SEQ ID NO: 22114 - RNA, 23 nt, artificial
  Oligomer
ugagccacaaaaauguuccuuua

SEQ ID NO: 22115 - RNA, 23 nt, artificial
  Oligomer
ucaucuuccuggaagcagagcug

SEQ ID NO: 22116 - RNA, 23 nt, artificial
  Oligomer
gucaucuuccuggaagcagagcu

SEQ ID NO: 22117 - RNA, 23 nt, artificial
  Oligomer
ugucaucuuccuggaagcagagc

SEQ ID NO: 22118 - RNA, 23 nt, artificial
  Oligomer
augucaucuuccuggaagcagag

SEQ ID NO: 22119 - RNA, 23 nt, artificial
  Oligomer
gaugucaucuuccuggaagcaga

SEQ ID NO: 22120 - RNA, 23 nt, artificial
  Oligomer
gucuugaaacaagcaacagaugg

SEQ ID NO: 22121 - RNA, 23 nt, artificial
  Oligomer
agucuugaaacaagcaacagaug

SEQ ID NO: 22122 - RNA, 23 nt, artificial
  Oligomer
aagucuugaaacaagcaacagau

SEQ ID NO: 22123 - RNA, 23 nt, artificial
  Oligomer
ccaugccaauuugcaaacucuca

SEQ ID NO: 22124 - RNA, 23 nt, artificial
  Oligomer
gaagaacugacuagugagauggc

SEQ ID NO: 22125 - RNA, 23 nt, artificial
  Oligomer
ugaagaacugacuagugagaugg

SEQ ID NO: 22126 - RNA, 23 nt, artificial
  Oligomer
uugaagaacugacuagugagaug

SEQ ID NO: 22127 - RNA, 23 nt, artificial
  Oligomer
cuugaagaacugacuagugagau

SEQ ID NO: 22128 - RNA, 23 nt, artificial
  Oligomer
ucuugaagaacugacuagugaga

SEQ ID NO: 22129 - RNA, 23 nt, artificial
  Oligomer
aggguacaggcaacaaugagcag

SEQ ID NO: 22130 - RNA, 23 nt, artificial
  Oligomer
uaggguacaggcaacaaugagca

SEQ ID NO: 22131 - RNA, 23 nt, artificial
  Oligomer
uguguaccugugacuaaacaacu

SEQ ID NO: 22132 - RNA, 23 nt, artificial
  Oligomer
guggaauagccucccuguaacuc

SEQ ID NO: 22133 - RNA, 23 nt, artificial
  Oligomer
aguggaauagccucccuguaacu

SEQ ID NO: 22134 - RNA, 23 nt, artificial
  Oligomer
aaguggaauagccucccuguaac

SEQ ID NO: 22135 - RNA, 23 nt, artificial
  Oligomer
uaaguggaauagccucccuguaa

SEQ ID NO: 22136 - RNA, 23 nt, artificial
  Oligomer
cuaaguggaauagccucccugua

SEQ ID NO: 22137 - RNA, 23 nt, artificial
  Oligomer
cuuucucuauagagcuugaggac

SEQ ID NO: 22138 - RNA, 23 nt, artificial
  Oligomer
ccuuucucuauagagcuugagga

SEQ ID NO: 22139 - RNA, 23 nt, artificial
  Oligomer
accuuucucuauagagcuugagg

SEQ ID NO: 22140 - RNA, 23 nt, artificial
  Oligomer
caccuuucucuauagagcuugag

SEQ ID NO: 22141 - RNA, 23 nt, artificial
  Oligomer
ucaccuuucucuauagagcuuga

SEQ ID NO: 22142 - RNA, 23 nt, artificial
  Oligomer
aacugucagugcuugcuaacuuc

SEQ ID NO: 22143 - RNA, 23 nt, artificial
  Oligomer
gaacugucagugcuugcuaacuu

SEQ ID NO: 22144 - RNA, 23 nt, artificial
  Oligomer
ugaacugucagugcuugcuaacu

SEQ ID NO: 22145 - RNA, 23 nt, artificial
  Oligomer
cugaacugucagugcuugcuaac

SEQ ID NO: 22146 - RNA, 23 nt, artificial
  Oligomer
ucugaacugucagugcuugcuaa

SEQ ID NO: 22147 - RNA, 23 nt, artificial
  Oligomer
gggccgcacaaguuuugauucgg

SEQ ID NO: 22148 - RNA, 23 nt, artificial
  Oligomer
ugggccgcacaaguuuugauucg

SEQ ID NO: 22149 - RNA, 23 nt, artificial
  Oligomer
augggccgcacaaguuuugauuc

SEQ ID NO: 22150 - RNA, 23 nt, artificial
  Oligomer
uaugggccgcacaaguuuugauu

SEQ ID NO: 22151 - RNA, 23 nt, artificial
  Oligomer
auaugggccgcacaaguuuugau

SEQ ID NO: 22152 - RNA, 23 nt, artificial
  Oligomer
ggcaggaccaggaaaacuugguu

SEQ ID NO: 22153 - RNA, 23 nt, artificial
  Oligomer
uggcaggaccaggaaaacuuggu

SEQ ID NO: 22154 - RNA, 23 nt, artificial
  Oligomer
uuggcaggaccaggaaaacuugg

SEQ ID NO: 22155 - RNA, 23 nt, artificial
  Oligomer
uuuggcaggaccaggaaaacuug

SEQ ID NO: 22156 - RNA, 23 nt, artificial
  Oligomer
uuuuggcaggaccaggaaaacuu

SEQ ID NO: 22157 - RNA, 23 nt, artificial
  Oligomer
cuagacaagcuuguccauguaau

SEQ ID NO: 22158 - RNA, 23 nt, artificial
  Oligomer
agacugccaugcuagacaagcuu

SEQ ID NO: 22159 - RNA, 23 nt, artificial
  Oligomer
uagacugccaugcuagacaagcu

SEQ ID NO: 22160 - RNA, 23 nt, artificial
  Oligomer
auagacugccaugcuagacaagc

SEQ ID NO: 22161 - RNA, 23 nt, artificial
  Oligomer
uauagacugccaugcuagacaag

SEQ ID NO: 22162 - RNA, 23 nt, artificial
  Oligomer
uuauagacugccaugcuagacaa

SEQ ID NO: 22163 - RNA, 23 nt, artificial
  Oligomer
gagugagcuaguaguauuuuggc

SEQ ID NO: 22164 - RNA, 23 nt, artificial
  Oligomer
ugagugagcuaguaguauuuugg

SEQ ID NO: 22165 - RNA, 23 nt, artificial
  Oligomer
cugagugagcuaguaguauuuug

SEQ ID NO: 22166 - RNA, 23 nt, artificial
  Oligomer
cuuugaaaaccuggcucuaaggu

SEQ ID NO: 22167 - RNA, 23 nt, artificial
  Oligomer
acuuugaaaaccuggcucuaagg

SEQ ID NO: 22168 - RNA, 23 nt, artificial
  Oligomer
gacuuugaaaaccuggcucuaag

SEQ ID NO: 22169 - RNA, 23 nt, artificial
  Oligomer
ugacuuugaaaaccuggcucuaa

SEQ ID NO: 22170 - RNA, 23 nt, artificial
  Oligomer
augacuuugaaaaccuggcucua

SEQ ID NO: 22171 - RNA, 23 nt, artificial
  Oligomer
ucaaggcaaccagaggaaacuug

SEQ ID NO: 22172 - RNA, 23 nt, artificial
  Oligomer
cucaaggcaaccagaggaaacuu

SEQ ID NO: 22173 - RNA, 23 nt, artificial
  Oligomer
gcucaaggcaaccagaggaaacu

SEQ ID NO: 22174 - RNA, 23 nt, artificial
  Oligomer
ugcucaaggcaaccagaggaaac

SEQ ID NO: 22175 - RNA, 23 nt, artificial
  Oligomer
uugcucaaggcaaccagaggaaa

SEQ ID NO: 22176 - RNA, 23 nt, artificial
  Oligomer
ggacauaagacagacagcaguuu

SEQ ID NO: 22177 - RNA, 23 nt, artificial
  Oligomer
uggacauaagacagacagcaguu

SEQ ID NO: 22178 - RNA, 23 nt, artificial
  Oligomer
auggacauaagacagacagcagu

SEQ ID NO: 22179 - RNA, 23 nt, artificial
  Oligomer
aauggacauaagacagacagcag

SEQ ID NO: 22180 - RNA, 23 nt, artificial
  Oligomer
aaauggacauaagacagacagca

SEQ ID NO: 22181 - RNA, 23 nt, artificial
  Oligomer
gauagucuguccaaauggacaua

SEQ ID NO: 22182 - RNA, 23 nt, artificial
  Oligomer
ggauagucuguccaaauggacau

SEQ ID NO: 22183 - RNA, 23 nt, artificial
  Oligomer
uggauagucuguccaaauggaca

SEQ ID NO: 22184 - RNA, 23 nt, artificial
  Oligomer
auggauagucuguccaaauggac

SEQ ID NO: 22185 - RNA, 23 nt, artificial
  Oligomer
caacagauggauagucuguccaa

SEQ ID NO: 22186 - RNA, 23 nt, artificial
  Oligomer
caaaagagaucacaauacucaaa

SEQ ID NO: 22187 - RNA, 23 nt, artificial
  Oligomer
ccaaaagagaucacaauacucaa

SEQ ID NO: 22188 - RNA, 23 nt, artificial
  Oligomer
accaaaagagaucacaauacuca

SEQ ID NO: 22189 - RNA, 23 nt, artificial
  Oligomer
aaccaaaagagaucacaauacuc

SEQ ID NO: 22190 - RNA, 23 nt, artificial
  Oligomer
caaugagacugcagaccugccau

SEQ ID NO: 22191 - RNA, 23 nt, artificial
  Oligomer
ucaaugagacugcagaccugcca

SEQ ID NO: 22192 - RNA, 23 nt, artificial
  Oligomer
uucaaugagacugcagaccugcc

SEQ ID NO: 22193 - RNA, 23 nt, artificial
  Oligomer
uuucaaugagacugcagaccugc

SEQ ID NO: 22194 - RNA, 23 nt, artificial
  Oligomer
auuucaaugagacugcagaccug

SEQ ID NO: 22195 - RNA, 23 nt, artificial
  Oligomer
uaucugggcuguugcuaauauug

SEQ ID NO: 22196 - RNA, 23 nt, artificial
  Oligomer
agucugggugggacuuauguauu

SEQ ID NO: 22197 - RNA, 23 nt, artificial
  Oligomer
gacuaaacaacuaccuccucagu

SEQ ID NO: 22198 - RNA, 23 nt, artificial
  Oligomer
ugacuaaacaacuaccuccucag

SEQ ID NO: 22199 - RNA, 23 nt, artificial
  Oligomer
gugacuaaacaacuaccuccuca

SEQ ID NO: 22200 - RNA, 23 nt, artificial
  Oligomer
ugugacuaaacaacuaccuccuc

SEQ ID NO: 22201 - RNA, 23 nt, artificial
  Oligomer
cugugacuaaacaacuaccuccu

SEQ ID NO: 22202 - RNA, 23 nt, artificial
  Oligomer
aagacauuaccaugaguaauaag

SEQ ID NO: 22203 - RNA, 23 nt, artificial
  Oligomer
aaagacauuaccaugaguaauaa

SEQ ID NO: 22204 - RNA, 23 nt, artificial
  Oligomer
aaaagacauuaccaugaguaaua

SEQ ID NO: 22205 - RNA, 23 nt, artificial
  Oligomer
aaaaagacauuaccaugaguaau

SEQ ID NO: 22206 - RNA, 23 nt, artificial
  Oligomer
caaaaagacauuaccaugaguaa

SEQ ID NO: 22207 - RNA, 23 nt, artificial
  Oligomer
ccagcguguuuuuaaaaguucga

SEQ ID NO: 22208 - RNA, 23 nt, artificial
  Oligomer
cccagcguguuuuuaaaaguucg

SEQ ID NO: 22209 - RNA, 23 nt, artificial
  Oligomer
gaugaagcccagcguguuuuuaa

SEQ ID NO: 22210 - RNA, 23 nt, artificial
  Oligomer
gagggaagagagugaacagacca

SEQ ID NO: 22211 - RNA, 23 nt, artificial
  Oligomer
agagggaagagagugaacagacc

SEQ ID NO: 22212 - RNA, 23 nt, artificial
  Oligomer
caacucuuauaaauguggaacca

SEQ ID NO: 22213 - RNA, 23 nt, artificial
  Oligomer
gcaacucuuauaaauguggaacc

SEQ ID NO: 22214 - RNA, 23 nt, artificial
  Oligomer
cgcaacucuuauaaauguggaac

SEQ ID NO: 22215 - RNA, 23 nt, artificial
  Oligomer
ucgcaacucuuauaaauguggaa

SEQ ID NO: 22216 - RNA, 23 nt, artificial
  Oligomer
cucgcaacucuuauaaaugugga

SEQ ID NO: 22217 - RNA, 23 nt, artificial
  Oligomer
gaugaguguuuugcuaagaacca

SEQ ID NO: 22218 - RNA, 23 nt, artificial
  Oligomer
agaugaguguuuugcuaagaacc

SEQ ID NO: 22219 - RNA, 23 nt, artificial
  Oligomer
aagaugaguguuuugcuaagaac

SEQ ID NO: 22220 - RNA, 23 nt, artificial
  Oligomer
ccagaaccuaagaagaugagugu

SEQ ID NO: 22221 - RNA, 23 nt, artificial
  Oligomer
cccagaaccuaagaagaugagug

SEQ ID NO: 22222 - RNA, 23 nt, artificial
  Oligomer
acccagaaccuaagaagaugagu

SEQ ID NO: 22223 - RNA, 23 nt, artificial
  Oligomer
uacccagaaccuaagaagaugag

SEQ ID NO: 22224 - RNA, 23 nt, artificial
  Oligomer
uuacccagaaccuaagaagauga

SEQ ID NO: 22225 - RNA, 23 nt, artificial
  Oligomer
aucaaggacaagggcuuguauca

SEQ ID NO: 22226 - RNA, 23 nt, artificial
  Oligomer
gaucaaggacaagggcuuguauc

SEQ ID NO: 22227 - RNA, 23 nt, artificial
  Oligomer
agaucaaggacaagggcuuguau

SEQ ID NO: 22228 - RNA, 23 nt, artificial
  Oligomer
uuugacaguguucauuccaagua

SEQ ID NO: 22229 - RNA, 23 nt, artificial
  Oligomer
auuugacaguguucauuccaagu

SEQ ID NO: 22230 - RNA, 23 nt, artificial
  Oligomer
aauuugacaguguucauuccaag

SEQ ID NO: 22231 - RNA, 23 nt, artificial
  Oligomer
aaauuugacaguguucauuccaa

SEQ ID NO: 22232 - RNA, 23 nt, artificial
  Oligomer
aaagagaaauuugacaguguuca

SEQ ID NO: 22233 - RNA, 23 nt, artificial
  Oligomer
caaagagaaauuugacaguguuc

SEQ ID NO: 22234 - RNA, 23 nt, artificial
  Oligomer
gcaaagagaaauuugacaguguu

SEQ ID NO: 22235 - RNA, 23 nt, artificial
  Oligomer
gaagagcugcaacggaauuagga

SEQ ID NO: 22236 - RNA, 23 nt, artificial
  Oligomer
ggaggcuuaggacuuuccacucc

SEQ ID NO: 22237 - RNA, 23 nt, artificial
  Oligomer
aggaggcuuaggacuuuccacuc

SEQ ID NO: 22238 - RNA, 23 nt, artificial
  Oligomer
aaggaggcuuaggacuuuccacu

SEQ ID NO: 22239 - RNA, 23 nt, artificial
  Oligomer
gaaggaggcuuaggacuuuccac

SEQ ID NO: 22240 - RNA, 23 nt, artificial
  Oligomer
ggaaggaggcuuaggacuuucca

SEQ ID NO: 22241 - RNA, 23 nt, artificial
  Oligomer
uggaaggaggcuuaggacuuucc

SEQ ID NO: 22242 - RNA, 23 nt, artificial
  Oligomer
auggaaggaggcuuaggacuuuc

SEQ ID NO: 22243 - RNA, 23 nt, artificial
  Oligomer
aauggaaggaggcuuaggacuuu

SEQ ID NO: 22244 - RNA, 23 nt, artificial
  Oligomer
agggagagccaucaccuugauaa

SEQ ID NO: 22245 - RNA, 23 nt, artificial
  Oligomer
gagggagagccaucaccuugaua

SEQ ID NO: 22246 - RNA, 23 nt, artificial
  Oligomer
ggagggagagccaucaccuugau

SEQ ID NO: 22247 - RNA, 23 nt, artificial
  Oligomer
aauuucuggaaaacugccuuuua

SEQ ID NO: 22248 - RNA, 23 nt, artificial
  Oligomer
cuucaugcgacaaaagugauaca

SEQ ID NO: 22249 - RNA, 23 nt, artificial
  Oligomer
ucuucaugcgacaaaagugauac

SEQ ID NO: 22250 - RNA, 23 nt, artificial
  Oligomer
aucuucaugcgacaaaagugaua

SEQ ID NO: 22251 - RNA, 23 nt, artificial
  Oligomer
caucuucaugcgacaaaagugau

SEQ ID NO: 22252 - RNA, 23 nt, artificial
  Oligomer
cuuauaaauguggaaccaacaca

SEQ ID NO: 22253 - RNA, 23 nt, artificial
  Oligomer
ucuuauaaauguggaaccaacac

SEQ ID NO: 22254 - RNA, 23 nt, artificial
  Oligomer
cucuuauaaauguggaaccaaca

SEQ ID NO: 22255 - RNA, 23 nt, artificial
  Oligomer
aagaaccaagaauucaacuaucg

SEQ ID NO: 22256 - RNA, 23 nt, artificial
  Oligomer
uaagaaccaagaauucaacuauc

SEQ ID NO: 22257 - RNA, 23 nt, artificial
  Oligomer
gcuugcuaacuucagucaaccug

SEQ ID NO: 22258 - RNA, 23 nt, artificial
  Oligomer
ugcuugcuaacuucagucaaccu

SEQ ID NO: 22259 - RNA, 23 nt, artificial
  Oligomer
gugcuugcuaacuucagucaacc

SEQ ID NO: 22260 - RNA, 23 nt, artificial
  Oligomer
agugcuugcuaacuucagucaac

SEQ ID NO: 22261 - RNA, 23 nt, artificial
  Oligomer
cagugcuugcuaacuucagucaa

SEQ ID NO: 22262 - RNA, 23 nt, artificial
  Oligomer
uucugaacugucagugcuugcua

SEQ ID NO: 22263 - RNA, 23 nt, artificial
  Oligomer
guauaugggccgcacaaguuuug

SEQ ID NO: 22264 - RNA, 23 nt, artificial
  Oligomer
aguauaugggccgcacaaguuuu

SEQ ID NO: 22265 - RNA, 23 nt, artificial
  Oligomer
gcaggaccaggaaaacuugguuc

SEQ ID NO: 22266 - RNA, 23 nt, artificial
  Oligomer
aggugggaucacuaagggauggg

SEQ ID NO: 22267 - RNA, 23 nt, artificial
  Oligomer
aaggugggaucacuaagggaugg

SEQ ID NO: 22268 - RNA, 23 nt, artificial
  Oligomer
uaaggugggaucacuaagggaug

SEQ ID NO: 22269 - RNA, 23 nt, artificial
  Oligomer
cuaaggugggaucacuaagggau

SEQ ID NO: 22270 - RNA, 23 nt, artificial
  Oligomer
ucuaaggugggaucacuaaggga

SEQ ID NO: 22271 - RNA, 23 nt, artificial
  Oligomer
aaccagaggaaacuugcauacag

SEQ ID NO: 22272 - RNA, 23 nt, artificial
  Oligomer
ugaguuggaugauuguuuuugcu

SEQ ID NO: 22273 - RNA, 23 nt, artificial
  Oligomer
uugaguuggaugauuguuuuugc

SEQ ID NO: 22274 - RNA, 23 nt, artificial
  Oligomer
uuugaguuggaugauuguuuuug

SEQ ID NO: 22275 - RNA, 23 nt, artificial
  Oligomer
auuugaguuggaugauuguuuuu

SEQ ID NO: 22276 - RNA, 23 nt, artificial
  Oligomer
aauuugaguuggaugauuguuuu

SEQ ID NO: 22277 - RNA, 23 nt, artificial
  Oligomer
uauugggaugucaucuuccugga

SEQ ID NO: 22278 - RNA, 23 nt, artificial
  Oligomer
caaauggacauaagacagacagc

SEQ ID NO: 22279 - RNA, 23 nt, artificial
  Oligomer
ccaaauggacauaagacagacag

SEQ ID NO: 22280 - RNA, 23 nt, artificial
  Oligomer
uccaaauggacauaagacagaca

SEQ ID NO: 22281 - RNA, 23 nt, artificial
  Oligomer
guccaaauggacauaagacagac

SEQ ID NO: 22282 - RNA, 23 nt, artificial
  Oligomer
uguccaaauggacauaagacaga

SEQ ID NO: 22283 - RNA, 23 nt, artificial
  Oligomer
ggcuguugcuaauauugaggagg

SEQ ID NO: 22284 - RNA, 23 nt, artificial
  Oligomer
gaucagauucuucucuuaauuuc

SEQ ID NO: 22285 - RNA, 23 nt, artificial
  Oligomer
cacuucagagcacacuuaugggc

SEQ ID NO: 22286 - RNA, 23 nt, artificial
  Oligomer
ucacuucagagcacacuuauggg

SEQ ID NO: 22287 - RNA, 23 nt, artificial
  Oligomer
uucacuucagagcacacuuaugg

SEQ ID NO: 22288 - RNA, 23 nt, artificial
  Oligomer
uuucacuucagagcacacuuaug

SEQ ID NO: 22289 - RNA, 23 nt, artificial
  Oligomer
uuuucacuucagagcacacuuau

SEQ ID NO: 22290 - RNA, 23 nt, artificial
  Oligomer
guaugccaagaggagacuuuaau

SEQ ID NO: 22291 - RNA, 23 nt, artificial
  Oligomer
cguaugccaagaggagacuuuaa

SEQ ID NO: 22292 - RNA, 23 nt, artificial
  Oligomer
gcaaaaagacauuaccaugagua

SEQ ID NO: 22293 - RNA, 23 nt, artificial
  Oligomer
ggcaaaaagacauuaccaugagu

SEQ ID NO: 22294 - RNA, 23 nt, artificial
  Oligomer
aggcaaaaagacauuaccaugag

SEQ ID NO: 22295 - RNA, 23 nt, artificial
  Oligomer
aaggcaaaaagacauuaccauga

SEQ ID NO: 22296 - RNA, 23 nt, artificial
  Oligomer
ccugggcaaccuuuuugauuucu

SEQ ID NO: 22297 - RNA, 23 nt, artificial
  Oligomer
uccugggcaaccuuuuugauuuc

SEQ ID NO: 22298 - RNA, 23 nt, artificial
  Oligomer
uuccugggcaaccuuuuugauuu

SEQ ID NO: 22299 - RNA, 23 nt, artificial
  Oligomer
guuccugggcaaccuuuuugauu

SEQ ID NO: 22300 - RNA, 23 nt, artificial
  Oligomer
aguuccugggcaaccuuuuugau

SEQ ID NO: 22301 - RNA, 23 nt, artificial
  Oligomer
uuuguaaguuccugggcaaccuu

SEQ ID NO: 22302 - RNA, 23 nt, artificial
  Oligomer
cuuuguaaguuccugggcaaccu

SEQ ID NO: 22303 - RNA, 23 nt, artificial
  Oligomer
ccuuuguaaguuccugggcaacc

SEQ ID NO: 22304 - RNA, 23 nt, artificial
  Oligomer
uccuuuguaaguuccugggcaac

SEQ ID NO: 22305 - RNA, 23 nt, artificial
  Oligomer
uuccuuuguaaguuccugggcaa

SEQ ID NO: 22306 - RNA, 23 nt, artificial
  Oligomer
aguaaagcccauacaaguauuca

SEQ ID NO: 22307 - RNA, 23 nt, artificial
  Oligomer
ccuaagaagaugaguguuuugcu

SEQ ID NO: 22308 - RNA, 23 nt, artificial
  Oligomer
accuaagaagaugaguguuuugc

SEQ ID NO: 22309 - RNA, 23 nt, artificial
  Oligomer
aaccuaagaagaugaguguuuug

SEQ ID NO: 22310 - RNA, 23 nt, artificial
  Oligomer
gaaccuaagaagaugaguguuuu

SEQ ID NO: 22311 - RNA, 23 nt, artificial
  Oligomer
uccaucacaaaaagcccacagga

SEQ ID NO: 22312 - RNA, 23 nt, artificial
  Oligomer
auccaucacaaaaagcccacagg

SEQ ID NO: 22313 - RNA, 23 nt, artificial
  Oligomer
cauccaucacaaaaagcccacag

SEQ ID NO: 22314 - RNA, 23 nt, artificial
  Oligomer
ucauccaucacaaaaagcccaca

SEQ ID NO: 22315 - RNA, 23 nt, artificial
  Oligomer
ggcaaagagaaauuugacagugu

SEQ ID NO: 22316 - RNA, 23 nt, artificial
  Oligomer
aggcaaagagaaauuugacagug

SEQ ID NO: 22317 - RNA, 23 nt, artificial
  Oligomer
agacagauauacugggagaaaug

SEQ ID NO: 22318 - RNA, 23 nt, artificial
  Oligomer
gagacagauauacugggagaaau

SEQ ID NO: 22319 - RNA, 23 nt, artificial
  Oligomer
agagacagauauacugggagaaa

SEQ ID NO: 22320 - RNA, 23 nt, artificial
  Oligomer
cagagacagauauacugggagaa

SEQ ID NO: 22321 - RNA, 23 nt, artificial
  Oligomer
acagagacagauauacugggaga

SEQ ID NO: 22322 - RNA, 23 nt, artificial
  Oligomer
gaauggaaggaggcuuaggacuu

SEQ ID NO: 22323 - RNA, 23 nt, artificial
  Oligomer
auacccaaguuauugggauguca

SEQ ID NO: 22324 - RNA, 23 nt, artificial
  Oligomer
aaauuaggagaggcagagauaga

SEQ ID NO: 22325 - RNA, 23 nt, artificial
  Oligomer
gaaauuaggagaggcagagauag

SEQ ID NO: 22326 - RNA, 23 nt, artificial
  Oligomer
aacugccuuuuaucugcccagaa

SEQ ID NO: 22327 - RNA, 23 nt, artificial
  Oligomer
ccucucaauuucuggaaaacugc

SEQ ID NO: 22328 - RNA, 23 nt, artificial
  Oligomer
accucucaauuucuggaaaacug

SEQ ID NO: 22329 - RNA, 23 nt, artificial
  Oligomer
gaccucucaauuucuggaaaacu

SEQ ID NO: 22330 - RNA, 23 nt, artificial
  Oligomer
agaccucucaauuucuggaaaac

SEQ ID NO: 22331 - RNA, 23 nt, artificial
  Oligomer
uagaccucucaauuucuggaaaa

SEQ ID NO: 22332 - RNA, 23 nt, artificial
  Oligomer
uuuccuuuguaaguuccugggca

SEQ ID NO: 22333 - RNA, 23 nt, artificial
  Oligomer
cagcguguuuuuaaaaguucgaa

SEQ ID NO: 22334 - RNA, 23 nt, artificial
  Oligomer
gacgcggcuuuuaucuucaccuu

SEQ ID NO: 22335 - RNA, 23 nt, artificial
  Oligomer
agacgcggcuuuuaucuucaccu

SEQ ID NO: 22336 - RNA, 23 nt, artificial
  Oligomer
aagacgcggcuuuuaucuucacc

SEQ ID NO: 22337 - RNA, 23 nt, artificial
  Oligomer
caagacgcggcuuuuaucuucac

SEQ ID NO: 22338 - RNA, 23 nt, artificial
  Oligomer
acaagacgcggcuuuuaucuuca

SEQ ID NO: 22339 - RNA, 23 nt, artificial
  Oligomer
aaacugacaagacgcggcuuuua

SEQ ID NO: 22340 - RNA, 23 nt, artificial
  Oligomer
aaaucucaagauaaugucacaga

SEQ ID NO: 22341 - RNA, 23 nt, artificial
  Oligomer
gaaaucucaagauaaugucacag

SEQ ID NO: 22342 - RNA, 23 nt, artificial
  Oligomer
agaaaucucaagauaaugucaca

SEQ ID NO: 22343 - RNA, 23 nt, artificial
  Oligomer
cuauacacgguuacccagaaccu

SEQ ID NO: 22344 - RNA, 23 nt, artificial
  Oligomer
ucuauacacgguuacccagaacc

SEQ ID NO: 22345 - RNA, 23 nt, artificial
  Oligomer
aucuauacacgguuacccagaac

SEQ ID NO: 22346 - RNA, 23 nt, artificial
  Oligomer
caucuauacacgguuacccagaa

SEQ ID NO: 22347 - RNA, 23 nt, artificial
  Oligomer
aaacuugcauacagagacagaua

SEQ ID NO: 22348 - RNA, 23 nt, artificial
  Oligomer
gaaacuugcauacagagacagau

SEQ ID NO: 22349 - RNA, 23 nt, artificial
  Oligomer
aauuaggaagaccaagacacaga

SEQ ID NO: 22350 - RNA, 23 nt, artificial
  Oligomer
gaauuaggaagaccaagacacag

SEQ ID NO: 22351 - RNA, 23 nt, artificial
  Oligomer
caagucuugaaacaagcaacaga

SEQ ID NO: 22352 - RNA, 23 nt, artificial
  Oligomer
acaagucuugaaacaagcaacag

SEQ ID NO: 22353 - RNA, 23 nt, artificial
  Oligomer
aacaagucuugaaacaagcaaca

SEQ ID NO: 22354 - RNA, 23 nt, artificial
  Oligomer
caacaagucuugaaacaagcaac

SEQ ID NO: 22355 - RNA, 23 nt, artificial
  Oligomer
ucaacaagucuugaaacaagcaa

SEQ ID NO: 22356 - RNA, 23 nt, artificial
  Oligomer
ggacucccucuaaguggaauagc

SEQ ID NO: 22357 - RNA, 23 nt, artificial
  Oligomer
aggacucccucuaaguggaauag

SEQ ID NO: 22358 - RNA, 23 nt, artificial
  Oligomer
caggacucccucuaaguggaaua

SEQ ID NO: 22359 - RNA, 23 nt, artificial
  Oligomer
ccaggacucccucuaaguggaau

SEQ ID NO: 22360 - RNA, 23 nt, artificial
  Oligomer
uccaggacucccucuaaguggaa

SEQ ID NO: 22361 - RNA, 23 nt, artificial
  Oligomer
agcccauacaaguauucauuuuu

SEQ ID NO: 22362 - RNA, 23 nt, artificial
  Oligomer
aagcccauacaaguauucauuuu

SEQ ID NO: 22363 - RNA, 23 nt, artificial
  Oligomer
aaagcccauacaaguauucauuu

SEQ ID NO: 22364 - RNA, 23 nt, artificial
  Oligomer
uaaagcccauacaaguauucauu

SEQ ID NO: 22365 - RNA, 23 nt, artificial
  Oligomer
guaaagcccauacaaguauucau

SEQ ID NO: 22366 - RNA, 23 nt, artificial
  Oligomer
cguguuuuuaaaaguucgaagac

SEQ ID NO: 22367 - RNA, 23 nt, artificial
  Oligomer
gcguguuuuuaaaaguucgaaga

SEQ ID NO: 22368 - RNA, 23 nt, artificial
  Oligomer
agcguguuuuuaaaaguucgaag

SEQ ID NO: 22369 - RNA, 23 nt, artificial
  Oligomer
acucuuauaaauguggaaccaac

SEQ ID NO: 22370 - RNA, 23 nt, artificial
  Oligomer
aacucuuauaaauguggaaccaa

SEQ ID NO: 22371 - RNA, 23 nt, artificial
  Oligomer
gauuacagcuguacuuccaacag

SEQ ID NO: 22372 - RNA, 23 nt, artificial
  Oligomer
ggauuacagcuguacuuccaaca

SEQ ID NO: 22373 - RNA, 23 nt, artificial
  Oligomer
uggauuacagcuguacuuccaac

SEQ ID NO: 22374 - RNA, 23 nt, artificial
  Oligomer
uuggauuacagcuguacuuccaa

SEQ ID NO: 22375 - RNA, 23 nt, artificial
  Oligomer
cuuggauuacagcuguacuucca

SEQ ID NO: 22376 - RNA, 23 nt, artificial
  Oligomer
guauucuggaaacugacaagacg

SEQ ID NO: 22377 - RNA, 23 nt, artificial
  Oligomer
uguauucuggaaacugacaagac

SEQ ID NO: 22378 - RNA, 23 nt, artificial
  Oligomer
cuguauucuggaaacugacaaga

SEQ ID NO: 22379 - RNA, 23 nt, artificial
  Oligomer
ucuguauucuggaaacugacaag

SEQ ID NO: 22380 - RNA, 23 nt, artificial
  Oligomer
uucuguauucuggaaacugacaa

SEQ ID NO: 22381 - RNA, 23 nt, artificial
  Oligomer
ucagugcuugcuaacuucaguca

SEQ ID NO: 22382 - RNA, 23 nt, artificial
  Oligomer
gucagugcuugcuaacuucaguc

SEQ ID NO: 22383 - RNA, 23 nt, artificial
  Oligomer
ugucagugcuugcuaacuucagu

SEQ ID NO: 22384 - RNA, 23 nt, artificial
  Oligomer
ucaauguaucauccaucacaaaa

SEQ ID NO: 22385 - RNA, 23 nt, artificial
  Oligomer
aucaauguaucauccaucacaaa

SEQ ID NO: 22386 - RNA, 23 nt, artificial
  Oligomer
acaagggcuuguaucaauguauc

SEQ ID NO: 22387 - RNA, 23 nt, artificial
  Oligomer
gacaagggcuuguaucaauguau

SEQ ID NO: 22388 - RNA, 23 nt, artificial
  Oligomer
uugguucugaaugagguauacuu

SEQ ID NO: 22389 - RNA, 23 nt, artificial
  Oligomer
cagauauacugggagaaaugacu

SEQ ID NO: 22390 - RNA, 23 nt, artificial
  Oligomer
acagauauacugggagaaaugac

SEQ ID NO: 22391 - RNA, 23 nt, artificial
  Oligomer
gacagauauacugggagaaauga

SEQ ID NO: 22392 - RNA, 23 nt, artificial
  Oligomer
ugaauggaaggaggcuuaggacu

SEQ ID NO: 22393 - RNA, 23 nt, artificial
  Oligomer
augaauggaaggaggcuuaggac

SEQ ID NO: 22394 - RNA, 23 nt, artificial
  Oligomer
gaugaauggaaggaggcuuagga

SEQ ID NO: 22395 - RNA, 23 nt, artificial
  Oligomer
uggugauacccaaguuauuggga

SEQ ID NO: 22396 - RNA, 23 nt, artificial
  Oligomer
uuggugauacccaaguuauuggg

SEQ ID NO: 22397 - RNA, 23 nt, artificial
  Oligomer
uuuggugauacccaaguuauugg

SEQ ID NO: 22398 - RNA, 23 nt, artificial
  Oligomer
uuuuggugauacccaaguuauug

SEQ ID NO: 22399 - RNA, 23 nt, artificial
  Oligomer
guuuuggugauacccaaguuauu

SEQ ID NO: 22400 - RNA, 23 nt, artificial
  Oligomer
ggagaggcagagauagaaccugg

SEQ ID NO: 22401 - RNA, 23 nt, artificial
  Oligomer
ccugcuaaggaguucucaucccu

SEQ ID NO: 22402 - RNA, 23 nt, artificial
  Oligomer
cccugcuaaggaguucucauccc

SEQ ID NO: 22403 - RNA, 23 nt, artificial
  Oligomer
ccccugcuaaggaguucucaucc

SEQ ID NO: 22404 - RNA, 23 nt, artificial
  Oligomer
accccugcuaaggaguucucauc

SEQ ID NO: 22405 - RNA, 23 nt, artificial
  Oligomer
uaccccugcuaaggaguucucau

SEQ ID NO: 22406 - RNA, 23 nt, artificial
  Oligomer
aacauagagaucuauguacugua

SEQ ID NO: 22407 - RNA, 23 nt, artificial
  Oligomer
guuuucugucuaauucuauggaa

SEQ ID NO: 22408 - RNA, 23 nt, artificial
  Oligomer
cauaaauuugaccugcucaucua

SEQ ID NO: 22409 - RNA, 23 nt, artificial
  Oligomer
acauaaauuugaccugcucaucu

SEQ ID NO: 22410 - RNA, 23 nt, artificial
  Oligomer
uacauaaauuugaccugcucauc

SEQ ID NO: 22411 - RNA, 23 nt, artificial
  Oligomer
guacauaaauuugaccugcucau

SEQ ID NO: 22412 - RNA, 23 nt, artificial
  Oligomer
uguacauaaauuugaccugcuca

SEQ ID NO: 22413 - RNA, 23 nt, artificial
  Oligomer
gcuagacaagcuuguccauguaa

SEQ ID NO: 22414 - RNA, 23 nt, artificial
  Oligomer
ugcuagacaagcuuguccaugua

SEQ ID NO: 22415 - RNA, 23 nt, artificial
  Oligomer
gauauacugggagaaaugacuuu

SEQ ID NO: 22416 - RNA, 23 nt, artificial
  Oligomer
agauauacugggagaaaugacuu

SEQ ID NO: 22417 - RNA, 23 nt, artificial
  Oligomer
aacuugcauacagagacagauau

SEQ ID NO: 22418 - RNA, 23 nt, artificial
  Oligomer
cuguccaaauggacauaagacag

SEQ ID NO: 22419 - RNA, 23 nt, artificial
  Oligomer
ucuguccaaauggacauaagaca

SEQ ID NO: 22420 - RNA, 23 nt, artificial
  Oligomer
gucuguccaaauggacauaagac

SEQ ID NO: 22421 - RNA, 23 nt, artificial
  Oligomer
agucuguccaaauggacauaaga

SEQ ID NO: 22422 - RNA, 23 nt, artificial
  Oligomer
ugugauuacuaugcucuagagaa

SEQ ID NO: 22423 - RNA, 23 nt, artificial
  Oligomer
gaauuuuguguguaccugugacu

SEQ ID NO: 22424 - RNA, 23 nt, artificial
  Oligomer
ugaauuuuguguguaccugugac

SEQ ID NO: 22425 - RNA, 23 nt, artificial
  Oligomer
cugaauuuuguguguaccuguga

SEQ ID NO: 22426 - RNA, 23 nt, artificial
  Oligomer
acugaauuuuguguguaccugug

SEQ ID NO: 22427 - RNA, 23 nt, artificial
  Oligomer
cacugaauuuuguguguaccugu

SEQ ID NO: 22428 - RNA, 23 nt, artificial
  Oligomer
cuuuuugauuucuuccagaaggc

SEQ ID NO: 22429 - RNA, 23 nt, artificial
  Oligomer
ccuuuuugauuucuuccagaagg

SEQ ID NO: 22430 - RNA, 23 nt, artificial
  Oligomer
accuuuuugauuucuuccagaag

SEQ ID NO: 22431 - RNA, 23 nt, artificial
  Oligomer
aaccuuuuugauuucuuccagaa

SEQ ID NO: 22432 - RNA, 23 nt, artificial
  Oligomer
caaccuuuuugauuucuuccaga

SEQ ID NO: 22433 - RNA, 23 nt, artificial
  Oligomer
gacugaguaacauucucuuugug

SEQ ID NO: 22434 - RNA, 23 nt, artificial
  Oligomer
ggacugaguaacauucucuuugu

SEQ ID NO: 22435 - RNA, 23 nt, artificial
  Oligomer
gggacugaguaacauucucuuug

SEQ ID NO: 22436 - RNA, 23 nt, artificial
  Oligomer
ugggacugaguaacauucucuuu

SEQ ID NO: 22437 - RNA, 23 nt, artificial
  Oligomer
augggacugaguaacauucucuu

SEQ ID NO: 22438 - RNA, 23 nt, artificial
  Oligomer
ucaugcgacaaaagugauacaug

SEQ ID NO: 22439 - RNA, 23 nt, artificial
  Oligomer
uucaugcgacaaaagugauacau

SEQ ID NO: 22440 - RNA, 23 nt, artificial
  Oligomer
guucgaagacaucuucaugcgac

SEQ ID NO: 22441 - RNA, 23 nt, artificial
  Oligomer
aguucgaagacaucuucaugcga

SEQ ID NO: 22442 - RNA, 23 nt, artificial
  Oligomer
ugaugaagcccagcguguuuuua

SEQ ID NO: 22443 - RNA, 23 nt, artificial
  Oligomer
cugaugaagcccagcguguuuuu

SEQ ID NO: 22444 - RNA, 23 nt, artificial
  Oligomer
ucugaugaagcccagcguguuuu

SEQ ID NO: 22445 - RNA, 23 nt, artificial
  Oligomer
aucugaugaagcccagcguguuu

SEQ ID NO: 22446 - RNA, 23 nt, artificial
  Oligomer
acacaauggagagggaagagagu

SEQ ID NO: 22447 - RNA, 23 nt, artificial
  Oligomer
aacacaauggagagggaagagag

SEQ ID NO: 22448 - RNA, 23 nt, artificial
  Oligomer
cuucuguauucuggaaacugaca

SEQ ID NO: 22449 - RNA, 23 nt, artificial
  Oligomer
ucuucuguauucuggaaacugac

SEQ ID NO: 22450 - RNA, 23 nt, artificial
  Oligomer
aucuucuguauucuggaaacuga

SEQ ID NO: 22451 - RNA, 23 nt, artificial
  Oligomer
aauuugaccugcucaucuauaca

SEQ ID NO: 22452 - RNA, 23 nt, artificial
  Oligomer
aaauuugaccugcucaucuauac

SEQ ID NO: 22453 - RNA, 23 nt, artificial
  Oligomer
uaaauuugaccugcucaucuaua

SEQ ID NO: 22454 - RNA, 23 nt, artificial
  Oligomer
auaaauuugaccugcucaucuau

SEQ ID NO: 22455 - RNA, 23 nt, artificial
  Oligomer
uaacuucagucaaccugaaauag

SEQ ID NO: 22456 - RNA, 23 nt, artificial
  Oligomer
cuaacuucagucaaccugaaaua

SEQ ID NO: 22457 - RNA, 23 nt, artificial
  Oligomer
gcuaacuucagucaaccugaaau

SEQ ID NO: 22458 - RNA, 23 nt, artificial
  Oligomer
ugcuaacuucagucaaccugaaa

SEQ ID NO: 22459 - RNA, 23 nt, artificial
  Oligomer
uugcuaacuucagucaaccugaa

SEQ ID NO: 22460 - RNA, 23 nt, artificial
  Oligomer
ugccaugccaauuugcaaacucu

SEQ ID NO: 22461 - RNA, 23 nt, artificial
  Oligomer
aaaugccagagcuugugaacccu

SEQ ID NO: 22462 - RNA, 23 nt, artificial
  Oligomer
aaaaugccagagcuugugaaccc

SEQ ID NO: 22463 - RNA, 23 nt, artificial
  Oligomer
gaaaaugccagagcuugugaacc

SEQ ID NO: 22464 - RNA, 23 nt, artificial
  Oligomer
aaacaggaaaaugccagagcuug

SEQ ID NO: 22465 - RNA, 23 nt, artificial
  Oligomer
uaaacaggaaaaugccagagcuu

SEQ ID NO: 22466 - RNA, 23 nt, artificial
  Oligomer
aguucucaucccucugucagggu

SEQ ID NO: 22467 - RNA, 23 nt, artificial
  Oligomer
gaguucucaucccucugucaggg

SEQ ID NO: 22468 - RNA, 23 nt, artificial
  Oligomer
ggaguucucaucccucugucagg

SEQ ID NO: 22469 - RNA, 23 nt, artificial
  Oligomer
aggaguucucaucccucugucag

SEQ ID NO: 22470 - RNA, 23 nt, artificial
  Oligomer
aaggaguucucaucccucuguca

SEQ ID NO: 22471 - RNA, 23 nt, artificial
  Oligomer
gaaggcaaaaagacauuaccaug

SEQ ID NO: 22472 - RNA, 23 nt, artificial
  Oligomer
agaaggcaaaaagacauuaccau

SEQ ID NO: 22473 - RNA, 23 nt, artificial
  Oligomer
gcccauacaaguauucauuuuuu

SEQ ID NO: 22474 - RNA, 23 nt, artificial
  Oligomer
uaugugugaugguuuucugucua

SEQ ID NO: 22475 - RNA, 23 nt, artificial
  Oligomer
auaugaccaucuucuguauucug

SEQ ID NO: 22476 - RNA, 23 nt, artificial
  Oligomer
aauaugaccaucuucuguauucu

SEQ ID NO: 22477 - RNA, 23 nt, artificial
  Oligomer
caauaugaccaucuucuguauuc

SEQ ID NO: 22478 - RNA, 23 nt, artificial
  Oligomer
gcaauaugaccaucuucuguauu

SEQ ID NO: 22479 - RNA, 23 nt, artificial
  Oligomer
agcaauaugaccaucuucuguau

SEQ ID NO: 22480 - RNA, 23 nt, artificial
  Oligomer
agaauucaacuaucgaguaugau

SEQ ID NO: 22481 - RNA, 23 nt, artificial
  Oligomer
aagaauucaacuaucgaguauga

SEQ ID NO: 22482 - RNA, 23 nt, artificial
  Oligomer
caagaauucaacuaucgaguaug

SEQ ID NO: 22483 - RNA, 23 nt, artificial
  Oligomer
aaccugaaauaguaccaauuucu

SEQ ID NO: 22484 - RNA, 23 nt, artificial
  Oligomer
aucuucagaucaaggacaagggc

SEQ ID NO: 22485 - RNA, 23 nt, artificial
  Oligomer
aaucuucagaucaaggacaaggg

SEQ ID NO: 22486 - RNA, 23 nt, artificial
  Oligomer
caaucuucagaucaaggacaagg

SEQ ID NO: 22487 - RNA, 23 nt, artificial
  Oligomer
acaaucuucagaucaaggacaag

SEQ ID NO: 22488 - RNA, 23 nt, artificial
  Oligomer
cacaaucuucagaucaaggacaa

SEQ ID NO: 22489 - RNA, 23 nt, artificial
  Oligomer
augcuagacaagcuuguccaugu

SEQ ID NO: 22490 - RNA, 23 nt, artificial
  Oligomer
caugcuagacaagcuuguccaug

SEQ ID NO: 22491 - RNA, 23 nt, artificial
  Oligomer
ccaugcuagacaagcuuguccau

SEQ ID NO: 22492 - RNA, 23 nt, artificial
  Oligomer
ggaugaauggaaggaggcuuagg

SEQ ID NO: 22493 - RNA, 23 nt, artificial
  Oligomer
gggaugaauggaaggaggcuuag

SEQ ID NO: 22494 - RNA, 23 nt, artificial
  Oligomer
ugggaugaauggaaggaggcuua

SEQ ID NO: 22495 - RNA, 23 nt, artificial
  Oligomer
augggaugaauggaaggaggcuu

SEQ ID NO: 22496 - RNA, 23 nt, artificial
  Oligomer
aaugggaugaauggaaggaggcu

SEQ ID NO: 22497 - RNA, 23 nt, artificial
  Oligomer
ugaaagaaccaaaagagaucaca

SEQ ID NO: 22498 - RNA, 23 nt, artificial
  Oligomer
caacaagccauaguggagagaac

SEQ ID NO: 22499 - RNA, 23 nt, artificial
  Oligomer
ccaacaagccauaguggagagaa

SEQ ID NO: 22500 - RNA, 23 nt, artificial
  Oligomer
cccaacaagccauaguggagaga

SEQ ID NO: 22501 - RNA, 23 nt, artificial
  Oligomer
acccaacaagccauaguggagag

SEQ ID NO: 22502 - RNA, 23 nt, artificial
  Oligomer
cacccaacaagccauaguggaga

SEQ ID NO: 22503 - RNA, 23 nt, artificial
  Oligomer
ggguacaggcaacaaugagcaga

SEQ ID NO: 22504 - RNA, 23 nt, artificial
  Oligomer
uacuaugcucuagagaaaagucu

SEQ ID NO: 22505 - RNA, 23 nt, artificial
  Oligomer
cagaaggcaaaaagacauuacca

SEQ ID NO: 22506 - RNA, 23 nt, artificial
  Oligomer
ucuacccuuuccuuuguaaguuc

SEQ ID NO: 22507 - RNA, 23 nt, artificial
  Oligomer
uucuacccuuuccuuuguaaguu

SEQ ID NO: 22508 - RNA, 23 nt, artificial
  Oligomer
uuucuacccuuuccuuuguaagu

SEQ ID NO: 22509 - RNA, 23 nt, artificial
  Oligomer
uuuucuacccuuuccuuuguaag

SEQ ID NO: 22510 - RNA, 23 nt, artificial
  Oligomer
uuuuucuacccuuuccuuuguaa

SEQ ID NO: 22511 - RNA, 23 nt, artificial
  Oligomer
gagagggaagagagugaacagac

SEQ ID NO: 22512 - RNA, 23 nt, artificial
  Oligomer
cacaauggagagggaagagagug

SEQ ID NO: 22513 - RNA, 23 nt, artificial
  Oligomer
gcuguacuuccaacaguuauuau

SEQ ID NO: 22514 - RNA, 23 nt, artificial
  Oligomer
agcuguacuuccaacaguuauua

SEQ ID NO: 22515 - RNA, 23 nt, artificial
  Oligomer
cagcuguacuuccaacaguuauu

SEQ ID NO: 22516 - RNA, 23 nt, artificial
  Oligomer
acagcuguacuuccaacaguuau

SEQ ID NO: 22517 - RNA, 23 nt, artificial
  Oligomer
uacagcuguacuuccaacaguua

SEQ ID NO: 22518 - RNA, 23 nt, artificial
  Oligomer
ccagaccacauuccuuggauuac

SEQ ID NO: 22519 - RNA, 23 nt, artificial
  Oligomer
cccagaccacauuccuuggauua

SEQ ID NO: 22520 - RNA, 23 nt, artificial
  Oligomer
ccccagaccacauuccuuggauu

SEQ ID NO: 22521 - RNA, 23 nt, artificial
  Oligomer
uuaucuucaccuuucucuauaga

SEQ ID NO: 22522 - RNA, 23 nt, artificial
  Oligomer
uuuaucuucaccuuucucuauag

SEQ ID NO: 22523 - RNA, 23 nt, artificial
  Oligomer
uuuuaucuucaccuuucucuaua

SEQ ID NO: 22524 - RNA, 23 nt, artificial
  Oligomer
cuuuuaucuucaccuuucucuau

SEQ ID NO: 22525 - RNA, 23 nt, artificial
  Oligomer
gcuuuuaucuucaccuuucucua

SEQ ID NO: 22526 - RNA, 23 nt, artificial
  Oligomer
gaauucaacuaucgaguaugaug

SEQ ID NO: 22527 - RNA, 23 nt, artificial
  Oligomer
guuuugcuaagaaccaagaauuc

SEQ ID NO: 22528 - RNA, 23 nt, artificial
  Oligomer
uguuuugcuaagaaccaagaauu

SEQ ID NO: 22529 - RNA, 23 nt, artificial
  Oligomer
ccugaaauaguaccaauuucuaa

SEQ ID NO: 22530 - RNA, 23 nt, artificial
  Oligomer
accugaaauaguaccaauuucua

SEQ ID NO: 22531 - RNA, 23 nt, artificial
  Oligomer
ccuggcuaguuucuaacauguuu

SEQ ID NO: 22532 - RNA, 23 nt, artificial
  Oligomer
accuggcuaguuucuaacauguu

SEQ ID NO: 22533 - RNA, 23 nt, artificial
  Oligomer
caccuggcuaguuucuaacaugu

SEQ ID NO: 22534 - RNA, 23 nt, artificial
  Oligomer
auagggcuagcaaauuugaguug

SEQ ID NO: 22535 - RNA, 23 nt, artificial
  Oligomer
cauagggcuagcaaauuugaguu

SEQ ID NO: 22536 - RNA, 23 nt, artificial
  Oligomer
aucaacaagucuugaaacaagca

SEQ ID NO: 22537 - RNA, 23 nt, artificial
  Oligomer
caucaacaagucuugaaacaagc

SEQ ID NO: 22538 - RNA, 23 nt, artificial
  Oligomer
uuuggggaaauuaggagaggcag

SEQ ID NO: 22539 - RNA, 23 nt, artificial
  Oligomer
guggccuaggguacaggcaacaa

SEQ ID NO: 22540 - RNA, 23 nt, artificial
  Oligomer
aaaacgguggccuaggguacagg

SEQ ID NO: 22541 - RNA, 23 nt, artificial
  Oligomer
gaaaacgguggccuaggguacag

SEQ ID NO: 22542 - RNA, 23 nt, artificial
  Oligomer
ggaaaacgguggccuaggguaca

SEQ ID NO: 22543 - RNA, 23 nt, artificial
  Oligomer
aggaaaacgguggccuaggguac

SEQ ID NO: 22544 - RNA, 23 nt, artificial
  Oligomer
aaggaaaacgguggccuagggua

SEQ ID NO: 22545 - RNA, 23 nt, artificial
  Oligomer
guacuguaauagugugauuacua

SEQ ID NO: 22546 - RNA, 23 nt, artificial
  Oligomer
uguacuguaauagugugauuacu

SEQ ID NO: 22547 - RNA, 23 nt, artificial
  Oligomer
auguacuguaauagugugauuac

SEQ ID NO: 22548 - RNA, 23 nt, artificial
  Oligomer
uauguacuguaauagugugauua

SEQ ID NO: 22549 - RNA, 23 nt, artificial
  Oligomer
cuauguacuguaauagugugauu

SEQ ID NO: 22550 - RNA, 23 nt, artificial
  Oligomer
gagaucuauguacuguaauagug

SEQ ID NO: 22551 - RNA, 23 nt, artificial
  Oligomer
acugcuucuuuucacuucagagc

SEQ ID NO: 22552 - RNA, 23 nt, artificial
  Oligomer
uacugcuucuuuucacuucagag

SEQ ID NO: 22553 - RNA, 23 nt, artificial
  Oligomer
cuuacugcuucuuuucacuucag

SEQ ID NO: 22554 - RNA, 23 nt, artificial
  Oligomer
ucuuacugcuucuuuucacuuca

SEQ ID NO: 22555 - RNA, 23 nt, artificial
  Oligomer
aggagacuuuaauucucuuacug

SEQ ID NO: 22556 - RNA, 23 nt, artificial
  Oligomer
gaggagacuuuaauucucuuacu

SEQ ID NO: 22557 - RNA, 23 nt, artificial
  Oligomer
agaggagacuuuaauucucuuac

SEQ ID NO: 22558 - RNA, 23 nt, artificial
  Oligomer
aagaggagacuuuaauucucuua

SEQ ID NO: 22559 - RNA, 23 nt, artificial
  Oligomer
caagaggagacuuuaauucucuu

SEQ ID NO: 22560 - RNA, 23 nt, artificial
  Oligomer
ccguaugccaagaggagacuuua

SEQ ID NO: 22561 - RNA, 23 nt, artificial
  Oligomer
uggaauagccucccuguaacucc

SEQ ID NO: 22562 - RNA, 23 nt, artificial
  Oligomer
ccugaaagaucugaugaagccca

SEQ ID NO: 22563 - RNA, 23 nt, artificial
  Oligomer
auaugugugaugguuuucugucu

SEQ ID NO: 22564 - RNA, 23 nt, artificial
  Oligomer
uccuuggauuacagcuguacuuc

SEQ ID NO: 22565 - RNA, 23 nt, artificial
  Oligomer
uuccuuggauuacagcuguacuu

SEQ ID NO: 22566 - RNA, 23 nt, artificial
  Oligomer
auuccuuggauuacagcuguacu

SEQ ID NO: 22567 - RNA, 23 nt, artificial
  Oligomer
cauuccuuggauuacagcuguac

SEQ ID NO: 22568 - RNA, 23 nt, artificial
  Oligomer
acauuccuuggauuacagcugua

SEQ ID NO: 22569 - RNA, 23 nt, artificial
  Oligomer
cuugcuaacuucagucaaccuga

SEQ ID NO: 22570 - RNA, 23 nt, artificial
  Oligomer
uucgcauccaccagaugaauucu

SEQ ID NO: 22571 - RNA, 23 nt, artificial
  Oligomer
auucgcauccaccagaugaauuc

SEQ ID NO: 22572 - RNA, 23 nt, artificial
  Oligomer
gauucgcauccaccagaugaauu

SEQ ID NO: 22573 - RNA, 23 nt, artificial
  Oligomer
ugauucgcauccaccagaugaau

SEQ ID NO: 22574 - RNA, 23 nt, artificial
  Oligomer
augauucgcauccaccagaugaa

SEQ ID NO: 22575 - RNA, 23 nt, artificial
  Oligomer
uaucaauguaucauccaucacaa

SEQ ID NO: 22576 - RNA, 23 nt, artificial
  Oligomer
guaucaauguaucauccaucaca

SEQ ID NO: 22577 - RNA, 23 nt, artificial
  Oligomer
uucacaaucuucagaucaaggac

SEQ ID NO: 22578 - RNA, 23 nt, artificial
  Oligomer
cuucacaaucuucagaucaagga

SEQ ID NO: 22579 - RNA, 23 nt, artificial
  Oligomer
acuucacaaucuucagaucaagg

SEQ ID NO: 22580 - RNA, 23 nt, artificial
  Oligomer
gacuucacaaucuucagaucaag

SEQ ID NO: 22581 - RNA, 23 nt, artificial
  Oligomer
agacuucacaaucuucagaucaa

SEQ ID NO: 22582 - RNA, 23 nt, artificial
  Oligomer
gaaaacuugguucugaaugaggu

SEQ ID NO: 22583 - RNA, 23 nt, artificial
  Oligomer
ugcucuagagaaaagucuacccc

SEQ ID NO: 22584 - RNA, 23 nt, artificial
  Oligomer
augcucuagagaaaagucuaccc

SEQ ID NO: 22585 - RNA, 23 nt, artificial
  Oligomer
uaugcucuagagaaaagucuacc

SEQ ID NO: 22586 - RNA, 23 nt, artificial
  Oligomer
cuaugcucuagagaaaagucuac

SEQ ID NO: 22587 - RNA, 23 nt, artificial
  Oligomer
acuaugcucuagagaaaagucua

SEQ ID NO: 22588 - RNA, 23 nt, artificial
  Oligomer
uuaucugcccagaauucuaagcu

SEQ ID NO: 22589 - RNA, 23 nt, artificial
  Oligomer
uuuaucugcccagaauucuaagc

SEQ ID NO: 22590 - RNA, 23 nt, artificial
  Oligomer
uuuuaucugcccagaauucuaag

SEQ ID NO: 22591 - RNA, 23 nt, artificial
  Oligomer
cuuuuaucugcccagaauucuaa

SEQ ID NO: 22592 - RNA, 23 nt, artificial
  Oligomer
ggaaaacugccuuuuaucugccc

SEQ ID NO: 22593 - RNA, 23 nt, artificial
  Oligomer
uggaaaacugccuuuuaucugcc

SEQ ID NO: 22594 - RNA, 23 nt, artificial
  Oligomer
gaauagccucccuguaacuccag

SEQ ID NO: 22595 - RNA, 23 nt, artificial
  Oligomer
ggaauagccucccuguaacucca

SEQ ID NO: 22596 - RNA, 23 nt, artificial
  Oligomer
aaaauccauauaccugaaagauc

SEQ ID NO: 22597 - RNA, 23 nt, artificial
  Oligomer
aaaaauccauauaccugaaagau

SEQ ID NO: 22598 - RNA, 23 nt, artificial
  Oligomer
aaaaaauccauauaccugaaaga

SEQ ID NO: 22599 - RNA, 23 nt, artificial
  Oligomer
uuuugcuaagaaccaagaauuca

SEQ ID NO: 22600 - RNA, 23 nt, artificial
  Oligomer
gguuacccagaaccuaagaagau

SEQ ID NO: 22601 - RNA, 23 nt, artificial
  Oligomer
cgguuacccagaaccuaagaaga

SEQ ID NO: 22602 - RNA, 23 nt, artificial
  Oligomer
acaaguuuugauucggacaguug

SEQ ID NO: 22603 - RNA, 23 nt, artificial
  Oligomer
cacaaguuuugauucggacaguu

SEQ ID NO: 22604 - RNA, 23 nt, artificial
  Oligomer
guguucauuccaaguauaugggc

SEQ ID NO: 22605 - RNA, 23 nt, artificial
  Oligomer
auuuuggcaggaccaggaaaacu

SEQ ID NO: 22606 - RNA, 23 nt, artificial
  Oligomer
uauuuuggcaggaccaggaaaac

SEQ ID NO: 22607 - RNA, 23 nt, artificial
  Oligomer
guauuuuggcaggaccaggaaaa

SEQ ID NO: 22608 - RNA, 23 nt, artificial
  Oligomer
aguauuuuggcaggaccaggaaa

SEQ ID NO: 22609 - RNA, 23 nt, artificial
  Oligomer
gcuaguuucuaacauguuuugug

SEQ ID NO: 22610 - RNA, 23 nt, artificial
  Oligomer
ggcuaguuucuaacauguuuugu

SEQ ID NO: 22611 - RNA, 23 nt, artificial
  Oligomer
uggcuaguuucuaacauguuuug

SEQ ID NO: 22612 - RNA, 23 nt, artificial
  Oligomer
cuggcuaguuucuaacauguuuu

SEQ ID NO: 22613 - RNA, 23 nt, artificial
  Oligomer
uguaaacccucaaggguuauaga

SEQ ID NO: 22614 - RNA, 23 nt, artificial
  Oligomer
auguaaacccucaaggguuauag

SEQ ID NO: 22615 - RNA, 23 nt, artificial
  Oligomer
uauguaaacccucaaggguuaua

SEQ ID NO: 22616 - RNA, 23 nt, artificial
  Oligomer
uuauguaaacccucaaggguuau

SEQ ID NO: 22617 - RNA, 23 nt, artificial
  Oligomer
uuuauguaaacccucaaggguua

SEQ ID NO: 22618 - RNA, 23 nt, artificial
  Oligomer
caaagccugagugagcuaguagu

SEQ ID NO: 22619 - RNA, 23 nt, artificial
  Oligomer
ggcuuacuuagccuacagauguc

SEQ ID NO: 22620 - RNA, 23 nt, artificial
  Oligomer
gggcuuacuuagccuacagaugu

SEQ ID NO: 22621 - RNA, 23 nt, artificial
  Oligomer
ggggcuuacuuagccuacagaug

SEQ ID NO: 22622 - RNA, 23 nt, artificial
  Oligomer
cggggcuuacuuagccuacagau

SEQ ID NO: 22623 - RNA, 23 nt, artificial
  Oligomer
ccggggcuuacuuagccuacaga

SEQ ID NO: 22624 - RNA, 23 nt, artificial
  Oligomer
uugauccacagaaauacaugaaa

SEQ ID NO: 22625 - RNA, 23 nt, artificial
  Oligomer
ucuauguacuguaauagugugau

SEQ ID NO: 22626 - RNA, 23 nt, artificial
  Oligomer
aucuauguacuguaauaguguga

SEQ ID NO: 22627 - RNA, 23 nt, artificial
  Oligomer
gaucuauguacuguaauagugug

SEQ ID NO: 22628 - RNA, 23 nt, artificial
  Oligomer
agaucuauguacuguaauagugu

SEQ ID NO: 22629 - RNA, 23 nt, artificial
  Oligomer
ugcuucuuuucacuucagagcac

SEQ ID NO: 22630 - RNA, 23 nt, artificial
  Oligomer
cugcuucuuuucacuucagagca

SEQ ID NO: 22631 - RNA, 23 nt, artificial
  Oligomer
aaguuccugggcaaccuuuuuga

SEQ ID NO: 22632 - RNA, 23 nt, artificial
  Oligomer
uaaguuccugggcaaccuuuuug

SEQ ID NO: 22633 - RNA, 23 nt, artificial
  Oligomer
guaaguuccugggcaaccuuuuu

SEQ ID NO: 22634 - RNA, 23 nt, artificial
  Oligomer
auuacagcuguacuuccaacagu

SEQ ID NO: 22635 - RNA, 23 nt, artificial
  Oligomer
gaaacugacaagacgcggcuuuu

SEQ ID NO: 22636 - RNA, 23 nt, artificial
  Oligomer
guuucauucccugauguuacgag

SEQ ID NO: 22637 - RNA, 23 nt, artificial
  Oligomer
uguuucauucccugauguuacga

SEQ ID NO: 22638 - RNA, 23 nt, artificial
  Oligomer
cuguuucauucccugauguuacg

SEQ ID NO: 22639 - RNA, 23 nt, artificial
  Oligomer
ucuguuucauucccugauguuac

SEQ ID NO: 22640 - RNA, 23 nt, artificial
  Oligomer
gucuguuucauucccugauguua

SEQ ID NO: 22641 - RNA, 23 nt, artificial
  Oligomer
guuacccagaaccuaagaagaug

SEQ ID NO: 22642 - RNA, 23 nt, artificial
  Oligomer
cugaaugagguauacuuaggcaa

SEQ ID NO: 22643 - RNA, 23 nt, artificial
  Oligomer
agcuaguaguauuuuggcaggac

SEQ ID NO: 22644 - RNA, 23 nt, artificial
  Oligomer
gagcuaguaguauuuuggcagga

SEQ ID NO: 22645 - RNA, 23 nt, artificial
  Oligomer
ugagcuaguaguauuuuggcagg

SEQ ID NO: 22646 - RNA, 23 nt, artificial
  Oligomer
gugagcuaguaguauuuuggcag

SEQ ID NO: 22647 - RNA, 23 nt, artificial
  Oligomer
agugagcuaguaguauuuuggca

SEQ ID NO: 22648 - RNA, 23 nt, artificial
  Oligomer
ccugagccacaaaaauguuccuu

SEQ ID NO: 22649 - RNA, 23 nt, artificial
  Oligomer
gccugagccacaaaaauguuccu

SEQ ID NO: 22650 - RNA, 23 nt, artificial
  Oligomer
agccugagccacaaaaauguucc

SEQ ID NO: 22651 - RNA, 23 nt, artificial
  Oligomer
uagggcuagcaaauuugaguugg

SEQ ID NO: 22652 - RNA, 23 nt, artificial
  Oligomer
cuacagauguccuacgggaacgu

SEQ ID NO: 22653 - RNA, 23 nt, artificial
  Oligomer
ccuacagauguccuacgggaacg

SEQ ID NO: 22654 - RNA, 23 nt, artificial
  Oligomer
gccuacagauguccuacgggaac

SEQ ID NO: 22655 - RNA, 23 nt, artificial
  Oligomer
agccuacagauguccuacgggaa

SEQ ID NO: 22656 - RNA, 23 nt, artificial
  Oligomer
uagccuacagauguccuacggga

SEQ ID NO: 22657 - RNA, 23 nt, artificial
  Oligomer
uggcugagagaggaagagcugca

SEQ ID NO: 22658 - RNA, 23 nt, artificial
  Oligomer
ggacuuauguauuuaugaccuua

SEQ ID NO: 22659 - RNA, 23 nt, artificial
  Oligomer
ucugaagauucaagcuuauuuca

SEQ ID NO: 22660 - RNA, 23 nt, artificial
  Oligomer
cuaaacaacuaccuccucagucu

SEQ ID NO: 22661 - RNA, 23 nt, artificial
  Oligomer
acuaaacaacuaccuccucaguc

SEQ ID NO: 22662 - RNA, 23 nt, artificial
  Oligomer
gcuucuuuucacuucagagcaca

SEQ ID NO: 22663 - RNA, 23 nt, artificial
  Oligomer
cuuuaauucucuuacugcuucuu

SEQ ID NO: 22664 - RNA, 23 nt, artificial
  Oligomer
acuuuaauucucuuacugcuucu

SEQ ID NO: 22665 - RNA, 23 nt, artificial
  Oligomer
gacuuuaauucucuuacugcuuc

SEQ ID NO: 22666 - RNA, 23 nt, artificial
  Oligomer
agacuuuaauucucuuacugcuu

SEQ ID NO: 22667 - RNA, 23 nt, artificial
  Oligomer
gagacuuuaauucucuuacugcu

SEQ ID NO: 22668 - RNA, 23 nt, artificial
  Oligomer
ucuaaguggaauagccucccugu

SEQ ID NO: 22669 - RNA, 23 nt, artificial
  Oligomer
cuccaggacucccucuaagugga

SEQ ID NO: 22670 - RNA, 23 nt, artificial
  Oligomer
cccccagaccacauuccuuggau

SEQ ID NO: 22671 - RNA, 23 nt, artificial
  Oligomer
gagcaauaugaccaucuucugua

SEQ ID NO: 22672 - RNA, 23 nt, artificial
  Oligomer
uguaucaauguaucauccaucac

SEQ ID NO: 22673 - RNA, 23 nt, artificial
  Oligomer
uuguaucaauguaucauccauca

SEQ ID NO: 22674 - RNA, 23 nt, artificial
  Oligomer
cuuguaucaauguaucauccauc

SEQ ID NO: 22675 - RNA, 23 nt, artificial
  Oligomer
gcuuguaucaauguaucauccau

SEQ ID NO: 22676 - RNA, 23 nt, artificial
  Oligomer
uaguauuuuggcaggaccaggaa

SEQ ID NO: 22677 - RNA, 23 nt, artificial
  Oligomer
gcuuguccauguaauauucccau

SEQ ID NO: 22678 - RNA, 23 nt, artificial
  Oligomer
agcuuguccauguaauauuccca

SEQ ID NO: 22679 - RNA, 23 nt, artificial
  Oligomer
aagcuuguccauguaauauuccc

SEQ ID NO: 22680 - RNA, 23 nt, artificial
  Oligomer
gagaaaugacuuugaaaaccugg

SEQ ID NO: 22681 - RNA, 23 nt, artificial
  Oligomer
ccaaagccugagugagcuaguag

SEQ ID NO: 22682 - RNA, 23 nt, artificial
  Oligomer
accaaagccugagugagcuagua

SEQ ID NO: 22683 - RNA, 23 nt, artificial
  Oligomer
aaccaaagccugagugagcuagu

SEQ ID NO: 22684 - RNA, 23 nt, artificial
  Oligomer
aaaccaaagccugagugagcuag

SEQ ID NO: 22685 - RNA, 23 nt, artificial
  Oligomer
aaaaccaaagccugagugagcua

SEQ ID NO: 22686 - RNA, 23 nt, artificial
  Oligomer
cauaagacagacagcaguuuccc

SEQ ID NO: 22687 - RNA, 23 nt, artificial
  Oligomer
acauaagacagacagcaguuucc

SEQ ID NO: 22688 - RNA, 23 nt, artificial
  Oligomer
gacauaagacagacagcaguuuc

SEQ ID NO: 22689 - RNA, 23 nt, artificial
  Oligomer
caagcaacagauggauagucugu

SEQ ID NO: 22690 - RNA, 23 nt, artificial
  Oligomer
acaagcaacagauggauagucug

SEQ ID NO: 22691 - RNA, 23 nt, artificial
  Oligomer
aacaagcaacagauggauagucu

SEQ ID NO: 22692 - RNA, 23 nt, artificial
  Oligomer
aaacaagcaacagauggauaguc

SEQ ID NO: 22693 - RNA, 23 nt, artificial
  Oligomer
gcuugugaacccuguuucucuug

SEQ ID NO: 22694 - RNA, 23 nt, artificial
  Oligomer
agcuugugaacccuguuucucuu

SEQ ID NO: 22695 - RNA, 23 nt, artificial
  Oligomer
gagcuugugaacccuguuucucu

SEQ ID NO: 22696 - RNA, 23 nt, artificial
  Oligomer
agagcuugugaacccuguuucuc

SEQ ID NO: 22697 - RNA, 23 nt, artificial
  Oligomer
cagagcuugugaacccuguuucu

SEQ ID NO: 22698 - RNA, 23 nt, artificial
  Oligomer
acaagccauaguggagagaacug

SEQ ID NO: 22699 - RNA, 23 nt, artificial
  Oligomer
aacaagccauaguggagagaacu

SEQ ID NO: 22700 - RNA, 23 nt, artificial
  Oligomer
ccuggagccacuucuaucugggc

SEQ ID NO: 22701 - RNA, 23 nt, artificial
  Oligomer
accuggagccacuucuaucuggg

SEQ ID NO: 22702 - RNA, 23 nt, artificial
  Oligomer
aaccuggagccacuucuaucugg

SEQ ID NO: 22703 - RNA, 23 nt, artificial
  Oligomer
ccugugacuaaacaacuaccucc

SEQ ID NO: 22704 - RNA, 23 nt, artificial
  Oligomer
auagaccucucaauuucuggaaa

SEQ ID NO: 22705 - RNA, 23 nt, artificial
  Oligomer
aauagaccucucaauuucuggaa

SEQ ID NO: 22706 - RNA, 23 nt, artificial
  Oligomer
cuuuucacuucagagcacacuua

SEQ ID NO: 22707 - RNA, 23 nt, artificial
  Oligomer
cccauacaaguauucauuuuuuc

SEQ ID NO: 22708 - RNA, 23 nt, artificial
  Oligomer
aauguggaaccaacacaauggag

SEQ ID NO: 22709 - RNA, 23 nt, artificial
  Oligomer
uuacagcuguacuuccaacaguu

SEQ ID NO: 22710 - RNA, 23 nt, artificial
  Oligomer
ggcuuuuaucuucaccuuucucu

SEQ ID NO: 22711 - RNA, 23 nt, artificial
  Oligomer
cggcuuuuaucuucaccuuucuc

SEQ ID NO: 22712 - RNA, 23 nt, artificial
  Oligomer
gcggcuuuuaucuucaccuuucu

SEQ ID NO: 22713 - RNA, 23 nt, artificial
  Oligomer
cgcggcuuuuaucuucaccuuuc

SEQ ID NO: 22714 - RNA, 23 nt, artificial
  Oligomer
acgcggcuuuuaucuucaccuuu

SEQ ID NO: 22715 - RNA, 23 nt, artificial
  Oligomer
ucaucuauacacgguuacccaga

SEQ ID NO: 22716 - RNA, 23 nt, artificial
  Oligomer
acccucaaggguuauagacugcc

SEQ ID NO: 22717 - RNA, 23 nt, artificial
  Oligomer
aacccucaaggguuauagacugc

SEQ ID NO: 22718 - RNA, 23 nt, artificial
  Oligomer
aaacccucaaggguuauagacug

SEQ ID NO: 22719 - RNA, 23 nt, artificial
  Oligomer
agguuuucaaagucauuucuccc

SEQ ID NO: 22720 - RNA, 23 nt, artificial
  Oligomer
gguuuucaaagucauuucuccca

SEQ ID NO: 22721 - RNA, 23 nt, artificial
  Oligomer
guuuucaaagucauuucucccag

SEQ ID NO: 22722 - RNA, 23 nt, artificial
  Oligomer
uuuucaaagucauuucucccagu

SEQ ID NO: 22723 - RNA, 23 nt, artificial
  Oligomer
uuucaaagucauuucucccagua

SEQ ID NO: 22724 - RNA, 23 nt, artificial
  Oligomer
cucuuuucuuggucuguucacuc

SEQ ID NO: 22725 - RNA, 23 nt, artificial
  Oligomer
ucuuuucuuggucuguucacucu

SEQ ID NO: 22726 - RNA, 23 nt, artificial
  Oligomer
cuuuucuuggucuguucacucuc

SEQ ID NO: 22727 - RNA, 23 nt, artificial
  Oligomer
uuuucuuggucuguucacucucu

SEQ ID NO: 22728 - RNA, 23 nt, artificial
  Oligomer
uuucuuggucuguucacucucuu

SEQ ID NO: 22729 - RNA, 23 nt, artificial
  Oligomer
cauguuagaaacuagccaggugc

SEQ ID NO: 22730 - RNA, 23 nt, artificial
  Oligomer
auguuagaaacuagccaggugcu

SEQ ID NO: 22731 - RNA, 23 nt, artificial
  Oligomer
uguuagaaacuagccaggugcua

SEQ ID NO: 22732 - RNA, 23 nt, artificial
  Oligomer
guuagaaacuagccaggugcuag

SEQ ID NO: 22733 - RNA, 23 nt, artificial
  Oligomer
uuagaaacuagccaggugcuagg

SEQ ID NO: 22734 - RNA, 23 nt, artificial
  Oligomer
uaacuuggguaucaccaaaaccc

SEQ ID NO: 22735 - RNA, 23 nt, artificial
  Oligomer
aacuuggguaucaccaaaacccc

SEQ ID NO: 22736 - RNA, 23 nt, artificial
  Oligomer
acuuggguaucaccaaaaccccu

SEQ ID NO: 22737 - RNA, 23 nt, artificial
  Oligomer
cuuggguaucaccaaaaccccuc

SEQ ID NO: 22738 - RNA, 23 nt, artificial
  Oligomer
uuggguaucaccaaaaccccucc

SEQ ID NO: 22739 - RNA, 23 nt, artificial
  Oligomer
auuuuuucucuuuucuuggucug

SEQ ID NO: 22740 - RNA, 23 nt, artificial
  Oligomer
uuuuuucucuuuucuuggucugu

SEQ ID NO: 22741 - RNA, 23 nt, artificial
  Oligomer
uuuuucucuuuucuuggucuguu

SEQ ID NO: 22742 - RNA, 23 nt, artificial
  Oligomer
uuuucucuuuucuuggucuguuc

SEQ ID NO: 22743 - RNA, 23 nt, artificial
  Oligomer
uuucucuuuucuuggucuguuca

SEQ ID NO: 22744 - RNA, 23 nt, artificial
  Oligomer
uuuauucaguucucuccacuaug

SEQ ID NO: 22745 - RNA, 23 nt, artificial
  Oligomer
uuauucaguucucuccacuaugg

SEQ ID NO: 22746 - RNA, 23 nt, artificial
  Oligomer
uauucaguucucuccacuauggc

SEQ ID NO: 22747 - RNA, 23 nt, artificial
  Oligomer
auucaguucucuccacuauggcu

SEQ ID NO: 22748 - RNA, 23 nt, artificial
  Oligomer
uucaguucucuccacuauggcuu

SEQ ID NO: 22749 - RNA, 23 nt, artificial
  Oligomer
gauuuuuucucuuuucuuggucu

SEQ ID NO: 22750 - RNA, 23 nt, artificial
  Oligomer
cucauucagaaccaaguuuuccu

SEQ ID NO: 22751 - RNA, 23 nt, artificial
  Oligomer
ucauucagaaccaaguuuuccug

SEQ ID NO: 22752 - RNA, 23 nt, artificial
  Oligomer
cauucagaaccaaguuuuccugg

SEQ ID NO: 22753 - RNA, 23 nt, artificial
  Oligomer
auucagaaccaaguuuuccuggu

SEQ ID NO: 22754 - RNA, 23 nt, artificial
  Oligomer
uucagaaccaaguuuuccugguc

SEQ ID NO: 22755 - RNA, 23 nt, artificial
  Oligomer
aacauuuuuguggcucaggcucc

SEQ ID NO: 22756 - RNA, 23 nt, artificial
  Oligomer
acauuuuuguggcucaggcuccc

SEQ ID NO: 22757 - RNA, 23 nt, artificial
  Oligomer
cauuuuuguggcucaggcucccc

SEQ ID NO: 22758 - RNA, 23 nt, artificial
  Oligomer
auuuuuguggcucaggcucccca

SEQ ID NO: 22759 - RNA, 23 nt, artificial
  Oligomer
uuuuuguggcucaggcuccccag

SEQ ID NO: 22760 - RNA, 23 nt, artificial
  Oligomer
caaauuugcuagcccuaugcugg

SEQ ID NO: 22761 - RNA, 23 nt, artificial
  Oligomer
aaauuugcuagcccuaugcuggg

SEQ ID NO: 22762 - RNA, 23 nt, artificial
  Oligomer
aauuugcuagcccuaugcugggc

SEQ ID NO: 22763 - RNA, 23 nt, artificial
  Oligomer
auuugcuagcccuaugcugggcc

SEQ ID NO: 22764 - RNA, 23 nt, artificial
  Oligomer
uuugcuagcccuaugcugggcca

SEQ ID NO: 22765 - RNA, 23 nt, artificial
  Oligomer
uaaauuuuauuuccaggucauga

SEQ ID NO: 22766 - RNA, 23 nt, artificial
  Oligomer
aaauuuuauuuccaggucaugag

SEQ ID NO: 22767 - RNA, 23 nt, artificial
  Oligomer
aauuuuauuuccaggucaugagc

SEQ ID NO: 22768 - RNA, 23 nt, artificial
  Oligomer
auuuuauuuccaggucaugagcc

SEQ ID NO: 22769 - RNA, 23 nt, artificial
  Oligomer
uuuuauuuccaggucaugagcca

SEQ ID NO: 22770 - RNA, 23 nt, artificial
  Oligomer
aacuuuuaaaaacacgcugggcu

SEQ ID NO: 22771 - RNA, 23 nt, artificial
  Oligomer
acuuuuaaaaacacgcugggcuu

SEQ ID NO: 22772 - RNA, 23 nt, artificial
  Oligomer
cuuuuaaaaacacgcugggcuuc

SEQ ID NO: 22773 - RNA, 23 nt, artificial
  Oligomer
uuuuaaaaacacgcugggcuuca

SEQ ID NO: 22774 - RNA, 23 nt, artificial
  Oligomer
uuuaaaaacacgcugggcuucau

SEQ ID NO: 22775 - RNA, 23 nt, artificial
  Oligomer
ugacauuaucuugagauuucugc

SEQ ID NO: 22776 - RNA, 23 nt, artificial
  Oligomer
gacauuaucuugagauuucugca

SEQ ID NO: 22777 - RNA, 23 nt, artificial
  Oligomer
acauuaucuugagauuucugcau

SEQ ID NO: 22778 - RNA, 23 nt, artificial
  Oligomer
cauuaucuugagauuucugcaua

SEQ ID NO: 22779 - RNA, 23 nt, artificial
  Oligomer
auuaucuugagauuucugcauaa

SEQ ID NO: 22780 - RNA, 23 nt, artificial
  Oligomer
ccuaauuccguugcagcucuucc

SEQ ID NO: 22781 - RNA, 23 nt, artificial
  Oligomer
cuaauuccguugcagcucuuccu

SEQ ID NO: 22782 - RNA, 23 nt, artificial
  Oligomer
uaauuccguugcagcucuuccuc

SEQ ID NO: 22783 - RNA, 23 nt, artificial
  Oligomer
aauuccguugcagcucuuccucu

SEQ ID NO: 22784 - RNA, 23 nt, artificial
  Oligomer
auuccguugcagcucuuccucuc

SEQ ID NO: 22785 - RNA, 23 nt, artificial
  Oligomer
uuccuguuuauucaguucucucc

SEQ ID NO: 22786 - RNA, 23 nt, artificial
  Oligomer
uccuguuuauucaguucucucca

SEQ ID NO: 22787 - RNA, 23 nt, artificial
  Oligomer
ccuguuuauucaguucucuccac

SEQ ID NO: 22788 - RNA, 23 nt, artificial
  Oligomer
cuguuuauucaguucucuccacu

SEQ ID NO: 22789 - RNA, 23 nt, artificial
  Oligomer
uguuuauucaguucucuccacua

SEQ ID NO: 22790 - RNA, 23 nt, artificial
  Oligomer
guuguuuagucacagguacacac

SEQ ID NO: 22791 - RNA, 23 nt, artificial
  Oligomer
uuguuuagucacagguacacaca

SEQ ID NO: 22792 - RNA, 23 nt, artificial
  Oligomer
uguuuagucacagguacacacaa

SEQ ID NO: 22793 - RNA, 23 nt, artificial
  Oligomer
guuuagucacagguacacacaaa

SEQ ID NO: 22794 - RNA, 23 nt, artificial
  Oligomer
uuuagucacagguacacacaaaa

SEQ ID NO: 22795 - RNA, 23 nt, artificial
  Oligomer
aauguuacucagucccauagugc

SEQ ID NO: 22796 - RNA, 23 nt, artificial
  Oligomer
auguuacucagucccauagugca

SEQ ID NO: 22797 - RNA, 23 nt, artificial
  Oligomer
uguuacucagucccauagugcac

SEQ ID NO: 22798 - RNA, 23 nt, artificial
  Oligomer
guuacucagucccauagugcacu

SEQ ID NO: 22799 - RNA, 23 nt, artificial
  Oligomer
uuacucagucccauagugcacug

SEQ ID NO: 22800 - RNA, 23 nt, artificial
  Oligomer
cagguuuucaaagucauuucucc

SEQ ID NO: 22801 - RNA, 23 nt, artificial
  Oligomer
ugucucuguaugcaaguuuccuc

SEQ ID NO: 22802 - RNA, 23 nt, artificial
  Oligomer
gucucuguaugcaaguuuccucu

SEQ ID NO: 22803 - RNA, 23 nt, artificial
  Oligomer
ucucuguaugcaaguuuccucug

SEQ ID NO: 22804 - RNA, 23 nt, artificial
  Oligomer
cucuguaugcaaguuuccucugg

SEQ ID NO: 22805 - RNA, 23 nt, artificial
  Oligomer
ucuguaugcaaguuuccucuggu

SEQ ID NO: 22806 - RNA, 23 nt, artificial
  Oligomer
ggaauauuacauggacaagcuug

SEQ ID NO: 22807 - RNA, 23 nt, artificial
  Oligomer
gaauauuacauggacaagcuugu

SEQ ID NO: 22808 - RNA, 23 nt, artificial
  Oligomer
aauauuacauggacaagcuuguc

SEQ ID NO: 22809 - RNA, 23 nt, artificial
  Oligomer
auauuacauggacaagcuugucu

SEQ ID NO: 22810 - RNA, 23 nt, artificial
  Oligomer
uauuacauggacaagcuugucua

SEQ ID NO: 22811 - RNA, 23 nt, artificial
  Oligomer
ggucuuccuaauuccguugcagc

SEQ ID NO: 22812 - RNA, 23 nt, artificial
  Oligomer
gucuuccuaauuccguugcagcu

SEQ ID NO: 22813 - RNA, 23 nt, artificial
  Oligomer
ucuuccuaauuccguugcagcuc

SEQ ID NO: 22814 - RNA, 23 nt, artificial
  Oligomer
cuuccuaauuccguugcagcucu

SEQ ID NO: 22815 - RNA, 23 nt, artificial
  Oligomer
uuccuaauuccguugcagcucuu

SEQ ID NO: 22816 - RNA, 23 nt, artificial
  Oligomer
uagguuggucugcucauuguugc

SEQ ID NO: 22817 - RNA, 23 nt, artificial
  Oligomer
agguuggucugcucauuguugcc

SEQ ID NO: 22818 - RNA, 23 nt, artificial
  Oligomer
gguuggucugcucauuguugccu

SEQ ID NO: 22819 - RNA, 23 nt, artificial
  Oligomer
guuggucugcucauuguugccug

SEQ ID NO: 22820 - RNA, 23 nt, artificial
  Oligomer
uuggucugcucauuguugccugu

SEQ ID NO: 22821 - RNA, 23 nt, artificial
  Oligomer
ucucuuuugguucuuucacagcu

SEQ ID NO: 22822 - RNA, 23 nt, artificial
  Oligomer
cucuuuugguucuuucacagcuu

SEQ ID NO: 22823 - RNA, 23 nt, artificial
  Oligomer
ucuuuugguucuuucacagcuuc

SEQ ID NO: 22824 - RNA, 23 nt, artificial
  Oligomer
cuuuugguucuuucacagcuucc

SEQ ID NO: 22825 - RNA, 23 nt, artificial
  Oligomer
uuuugguucuuucacagcuuccc

SEQ ID NO: 22826 - RNA, 23 nt, artificial
  Oligomer
ccgcuucuucuucuuccauuucc

SEQ ID NO: 22827 - RNA, 23 nt, artificial
  Oligomer
cgcuucuucuucuuccauuucca

SEQ ID NO: 22828 - RNA, 23 nt, artificial
  Oligomer
gcuucuucuucuuccauuuccau

SEQ ID NO: 22829 - RNA, 23 nt, artificial
  Oligomer
cuucuucuucuuccauuuccaua

SEQ ID NO: 22830 - RNA, 23 nt, artificial
  Oligomer
uucuucuucuuccauuuccauag

SEQ ID NO: 22831 - RNA, 23 nt, artificial
  Oligomer
ucuucuucuuccauuuccauaga

SEQ ID NO: 22832 - RNA, 23 nt, artificial
  Oligomer
cuucuucuuccauuuccauagaa

SEQ ID NO: 22833 - RNA, 23 nt, artificial
  Oligomer
uucuucuuccauuuccauagaau

SEQ ID NO: 22834 - RNA, 23 nt, artificial
  Oligomer
ucuucuuccauuuccauagaauu

SEQ ID NO: 22835 - RNA, 23 nt, artificial
  Oligomer
uuccguugcagcucuuccucucu

SEQ ID NO: 22836 - RNA, 23 nt, artificial
  Oligomer
uuccauucaucccauuaucaagg

SEQ ID NO: 22837 - RNA, 23 nt, artificial
  Oligomer
uccauucaucccauuaucaaggu

SEQ ID NO: 22838 - RNA, 23 nt, artificial
  Oligomer
ccauucaucccauuaucaaggug

SEQ ID NO: 22839 - RNA, 23 nt, artificial
  Oligomer
cauucaucccauuaucaagguga

SEQ ID NO: 22840 - RNA, 23 nt, artificial
  Oligomer
auucaucccauuaucaaggugau

SEQ ID NO: 22841 - RNA, 23 nt, artificial
  Oligomer
aauuuagguuggucugcucauug

SEQ ID NO: 22842 - RNA, 23 nt, artificial
  Oligomer
auuuagguuggucugcucauugu

SEQ ID NO: 22843 - RNA, 23 nt, artificial
  Oligomer
uuuagguuggucugcucauuguu

SEQ ID NO: 22844 - RNA, 23 nt, artificial
  Oligomer
uuagguuggucugcucauuguug

SEQ ID NO: 22845 - RNA, 23 nt, artificial
  Oligomer
uccauuuccauagaauuagacag

SEQ ID NO: 22846 - RNA, 23 nt, artificial
  Oligomer
ccauuuccauagaauuagacaga

SEQ ID NO: 22847 - RNA, 23 nt, artificial
  Oligomer
cauuuccauagaauuagacagaa

SEQ ID NO: 22848 - RNA, 23 nt, artificial
  Oligomer
auuuccauagaauuagacagaaa

SEQ ID NO: 22849 - RNA, 23 nt, artificial
  Oligomer
uuuccauagaauuagacagaaaa

SEQ ID NO: 22850 - RNA, 23 nt, artificial
  Oligomer
acaguucugugacauuaucuuga

SEQ ID NO: 22851 - RNA, 23 nt, artificial
  Oligomer
caguucugugacauuaucuugag

SEQ ID NO: 22852 - RNA, 23 nt, artificial
  Oligomer
aguucugugacauuaucuugaga

SEQ ID NO: 22853 - RNA, 23 nt, artificial
  Oligomer
guucugugacauuaucuugagau

SEQ ID NO: 22854 - RNA, 23 nt, artificial
  Oligomer
uucugugacauuaucuugagauu

SEQ ID NO: 22855 - RNA, 23 nt, artificial
  Oligomer
ugccuugagcaaaaacaaucauc

SEQ ID NO: 22856 - RNA, 23 nt, artificial
  Oligomer
gccuugagcaaaaacaaucaucc

SEQ ID NO: 22857 - RNA, 23 nt, artificial
  Oligomer
ccuugagcaaaaacaaucaucca

SEQ ID NO: 22858 - RNA, 23 nt, artificial
  Oligomer
cuugagcaaaaacaaucauccaa

SEQ ID NO: 22859 - RNA, 23 nt, artificial
  Oligomer
uugagcaaaaacaaucauccaac

SEQ ID NO: 22860 - RNA, 23 nt, artificial
  Oligomer
uccauuuggacagacuauccauc

SEQ ID NO: 22861 - RNA, 23 nt, artificial
  Oligomer
ccauuuggacagacuauccaucu

SEQ ID NO: 22862 - RNA, 23 nt, artificial
  Oligomer
cauuuggacagacuauccaucug

SEQ ID NO: 22863 - RNA, 23 nt, artificial
  Oligomer
auuuggacagacuauccaucugu

SEQ ID NO: 22864 - RNA, 23 nt, artificial
  Oligomer
uuuggacagacuauccaucuguu

SEQ ID NO: 22865 - RNA, 23 nt, artificial
  Oligomer
cuuguuucaagacuuguugaugg

SEQ ID NO: 22866 - RNA, 23 nt, artificial
  Oligomer
uuguuucaagacuuguugauggg

SEQ ID NO: 22867 - RNA, 23 nt, artificial
  Oligomer
uguuucaagacuuguugaugggg

SEQ ID NO: 22868 - RNA, 23 nt, artificial
  Oligomer
guuucaagacuuguugauggggu

SEQ ID NO: 22869 - RNA, 23 nt, artificial
  Oligomer
uuucaagacuuguugauggggug

SEQ ID NO: 22870 - RNA, 23 nt, artificial
  Oligomer
uaucucugccucuccuaauuucc

SEQ ID NO: 22871 - RNA, 23 nt, artificial
  Oligomer
aucucugccucuccuaauuuccc

SEQ ID NO: 22872 - RNA, 23 nt, artificial
  Oligomer
ucucugccucuccuaauuucccc

SEQ ID NO: 22873 - RNA, 23 nt, artificial
  Oligomer
cucugccucuccuaauuucccca

SEQ ID NO: 22874 - RNA, 23 nt, artificial
  Oligomer
ucugccucuccuaauuuccccaa

SEQ ID NO: 22875 - RNA, 23 nt, artificial
  Oligomer
gagguaguuguuuagucacaggu

SEQ ID NO: 22876 - RNA, 23 nt, artificial
  Oligomer
agguaguuguuuagucacaggua

SEQ ID NO: 22877 - RNA, 23 nt, artificial
  Oligomer
gguaguuguuuagucacagguac

SEQ ID NO: 22878 - RNA, 23 nt, artificial
  Oligomer
guaguuguuuagucacagguaca

SEQ ID NO: 22879 - RNA, 23 nt, artificial
  Oligomer
uaguuguuuagucacagguacac

SEQ ID NO: 22880 - RNA, 23 nt, artificial
  Oligomer
uuuauuuccaggucaugagccau

SEQ ID NO: 22881 - RNA, 23 nt, artificial
  Oligomer
guggaugcgaaucauuccugugg

SEQ ID NO: 22882 - RNA, 23 nt, artificial
  Oligomer
uggaugcgaaucauuccuguggg

SEQ ID NO: 22883 - RNA, 23 nt, artificial
  Oligomer
ggaugcgaaucauuccugugggc

SEQ ID NO: 22884 - RNA, 23 nt, artificial
  Oligomer
gaugcgaaucauuccugugggcu

SEQ ID NO: 22885 - RNA, 23 nt, artificial
  Oligomer
augcgaaucauuccugugggcuu

SEQ ID NO: 22886 - RNA, 23 nt, artificial
  Oligomer
ugguuuugagaguuugcaaauug

SEQ ID NO: 22887 - RNA, 23 nt, artificial
  Oligomer
gguuuugagaguuugcaaauugg

SEQ ID NO: 22888 - RNA, 23 nt, artificial
  Oligomer
guuuugagaguuugcaaauuggc

SEQ ID NO: 22889 - RNA, 23 nt, artificial
  Oligomer
uuuugagaguuugcaaauuggca

SEQ ID NO: 22890 - RNA, 23 nt, artificial
  Oligomer
uuugagaguuugcaaauuggcau

SEQ ID NO: 22891 - RNA, 23 nt, artificial
  Oligomer
aaaaacauguaucacuuuugucg

SEQ ID NO: 22892 - RNA, 23 nt, artificial
  Oligomer
aaaacauguaucacuuuugucgc

SEQ ID NO: 22893 - RNA, 23 nt, artificial
  Oligomer
aaacauguaucacuuuugucgca

SEQ ID NO: 22894 - RNA, 23 nt, artificial
  Oligomer
aacauguaucacuuuugucgcau

SEQ ID NO: 22895 - RNA, 23 nt, artificial
  Oligomer
acauguaucacuuuugucgcaug

SEQ ID NO: 22896 - RNA, 23 nt, artificial
  Oligomer
uucuuggucuguucacucucuuc

SEQ ID NO: 22897 - RNA, 23 nt, artificial
  Oligomer
ucuuggucuguucacucucuucc

SEQ ID NO: 22898 - RNA, 23 nt, artificial
  Oligomer
ugagcaaaaacaaucauccaacu

SEQ ID NO: 22899 - RNA, 23 nt, artificial
  Oligomer
gcagucucauugaaauaagcuug

SEQ ID NO: 22900 - RNA, 23 nt, artificial
  Oligomer
cagucucauugaaauaagcuuga

SEQ ID NO: 22901 - RNA, 23 nt, artificial
  Oligomer
agucucauugaaauaagcuugaa

SEQ ID NO: 22902 - RNA, 23 nt, artificial
  Oligomer
gucucauugaaauaagcuugaau

SEQ ID NO: 22903 - RNA, 23 nt, artificial
  Oligomer
ucucauugaaauaagcuugaauc

SEQ ID NO: 22904 - RNA, 23 nt, artificial
  Oligomer
caggucaugagccauuaagcugg

SEQ ID NO: 22905 - RNA, 23 nt, artificial
  Oligomer
aggucaugagccauuaagcuggg

SEQ ID NO: 22906 - RNA, 23 nt, artificial
  Oligomer
ggucaugagccauuaagcugggc

SEQ ID NO: 22907 - RNA, 23 nt, artificial
  Oligomer
gucaugagccauuaagcugggcu

SEQ ID NO: 22908 - RNA, 23 nt, artificial
  Oligomer
ucaugagccauuaagcugggcuu

SEQ ID NO: 22909 - RNA, 23 nt, artificial
  Oligomer
ucuguucacucucuucccucucc

SEQ ID NO: 22910 - RNA, 23 nt, artificial
  Oligomer
cuguucacucucuucccucucca

SEQ ID NO: 22911 - RNA, 23 nt, artificial
  Oligomer
uguucacucucuucccucuccau

SEQ ID NO: 22912 - RNA, 23 nt, artificial
  Oligomer
guucacucucuucccucuccauu

SEQ ID NO: 22913 - RNA, 23 nt, artificial
  Oligomer
uucacucucuucccucuccauug

SEQ ID NO: 22914 - RNA, 23 nt, artificial
  Oligomer
cacauuuauaagaguugcgaggc

SEQ ID NO: 22915 - RNA, 23 nt, artificial
  Oligomer
acauuuauaagaguugcgaggcc

SEQ ID NO: 22916 - RNA, 23 nt, artificial
  Oligomer
cauuuauaagaguugcgaggccg

SEQ ID NO: 22917 - RNA, 23 nt, artificial
  Oligomer
auuuauaagaguugcgaggccgc

SEQ ID NO: 22918 - RNA, 23 nt, artificial
  Oligomer
uuuauaagaguugcgaggccgcu

SEQ ID NO: 22919 - RNA, 23 nt, artificial
  Oligomer
aucauuccugugggcuuuuugug

SEQ ID NO: 22920 - RNA, 23 nt, artificial
  Oligomer
ucauuccugugggcuuuuuguga

SEQ ID NO: 22921 - RNA, 23 nt, artificial
  Oligomer
cauuccugugggcuuuuugugau

SEQ ID NO: 22922 - RNA, 23 nt, artificial
  Oligomer
auuccugugggcuuuuugugaug

SEQ ID NO: 22923 - RNA, 23 nt, artificial
  Oligomer
uuccugugggcuuuuugugaugg

SEQ ID NO: 22924 - RNA, 23 nt, artificial
  Oligomer
uucaaagucauuucucccaguau

SEQ ID NO: 22925 - RNA, 23 nt, artificial
  Oligomer
ggugaucugugucuuggucuucc

SEQ ID NO: 22926 - RNA, 23 nt, artificial
  Oligomer
gugaucugugucuuggucuuccu

SEQ ID NO: 22927 - RNA, 23 nt, artificial
  Oligomer
ugaucugugucuuggucuuccua

SEQ ID NO: 22928 - RNA, 23 nt, artificial
  Oligomer
gaucugugucuuggucuuccuaa

SEQ ID NO: 22929 - RNA, 23 nt, artificial
  Oligomer
aucugugucuuggucuuccuaau

SEQ ID NO: 22930 - RNA, 23 nt, artificial
  Oligomer
cagauagaaguggcuccagguuc

SEQ ID NO: 22931 - RNA, 23 nt, artificial
  Oligomer
agauagaaguggcuccagguucu

SEQ ID NO: 22932 - RNA, 23 nt, artificial
  Oligomer
gauagaaguggcuccagguucua

SEQ ID NO: 22933 - RNA, 23 nt, artificial
  Oligomer
auagaaguggcuccagguucuau

SEQ ID NO: 22934 - RNA, 23 nt, artificial
  Oligomer
uagaaguggcuccagguucuauc

SEQ ID NO: 22935 - RNA, 23 nt, artificial
  Oligomer
uucucuuuucuuggucuguucac

SEQ ID NO: 22936 - RNA, 23 nt, artificial
  Oligomer
ucucuuuucuuggucuguucacu

SEQ ID NO: 22937 - RNA, 23 nt, artificial
  Oligomer
uugguacuauuucagguugacug

SEQ ID NO: 22938 - RNA, 23 nt, artificial
  Oligomer
ugguacuauuucagguugacuga

SEQ ID NO: 22939 - RNA, 23 nt, artificial
  Oligomer
gguacuauuucagguugacugaa

SEQ ID NO: 22940 - RNA, 23 nt, artificial
  Oligomer
guacuauuucagguugacugaag

SEQ ID NO: 22941 - RNA, 23 nt, artificial
  Oligomer
uacuauuucagguugacugaagu

SEQ ID NO: 22942 - RNA, 23 nt, artificial
  Oligomer
ccauauacuuggaaugaacacug

SEQ ID NO: 22943 - RNA, 23 nt, artificial
  Oligomer
cauauacuuggaaugaacacugu

SEQ ID NO: 22944 - RNA, 23 nt, artificial
  Oligomer
auauacuuggaaugaacacuguc

SEQ ID NO: 22945 - RNA, 23 nt, artificial
  Oligomer
uauacuuggaaugaacacuguca

SEQ ID NO: 22946 - RNA, 23 nt, artificial
  Oligomer
auacuuggaaugaacacugucaa

SEQ ID NO: 22947 - RNA, 23 nt, artificial
  Oligomer
uuauaagaguugcgaggccgcuu

SEQ ID NO: 22948 - RNA, 23 nt, artificial
  Oligomer
uauaagaguugcgaggccgcuuc

SEQ ID NO: 22949 - RNA, 23 nt, artificial
  Oligomer
acagaagauggucauauugcucg

SEQ ID NO: 22950 - RNA, 23 nt, artificial
  Oligomer
cagaagauggucauauugcucgu

SEQ ID NO: 22951 - RNA, 23 nt, artificial
  Oligomer
agaagauggucauauugcucgua

SEQ ID NO: 22952 - RNA, 23 nt, artificial
  Oligomer
gaagauggucauauugcucguaa

SEQ ID NO: 22953 - RNA, 23 nt, artificial
  Oligomer
aagauggucauauugcucguaac

SEQ ID NO: 22954 - RNA, 23 nt, artificial
  Oligomer
uaucuugagauuucugcauaaca

SEQ ID NO: 22955 - RNA, 23 nt, artificial
  Oligomer
aucuugagauuucugcauaacac

SEQ ID NO: 22956 - RNA, 23 nt, artificial
  Oligomer
ucuugagauuucugcauaacacc

SEQ ID NO: 22957 - RNA, 23 nt, artificial
  Oligomer
cuugagauuucugcauaacacca

SEQ ID NO: 22958 - RNA, 23 nt, artificial
  Oligomer
uugagauuucugcauaacaccau

SEQ ID NO: 22959 - RNA, 23 nt, artificial
  Oligomer
uucuuagcaaaacacucaucuuc

SEQ ID NO: 22960 - RNA, 23 nt, artificial
  Oligomer
ucuuagcaaaacacucaucuucu

SEQ ID NO: 22961 - RNA, 23 nt, artificial
  Oligomer
cuuagcaaaacacucaucuucuu

SEQ ID NO: 22962 - RNA, 23 nt, artificial
  Oligomer
uuagcaaaacacucaucuucuua

SEQ ID NO: 22963 - RNA, 23 nt, artificial
  Oligomer
uagcaaaacacucaucuucuuag

SEQ ID NO: 22964 - RNA, 23 nt, artificial
  Oligomer
ucucuuuauguuugggcagagac

SEQ ID NO: 22965 - RNA, 23 nt, artificial
  Oligomer
cucuuuauguuugggcagagacu

SEQ ID NO: 22966 - RNA, 23 nt, artificial
  Oligomer
ucuuuauguuugggcagagacug

SEQ ID NO: 22967 - RNA, 23 nt, artificial
  Oligomer
cuuuauguuugggcagagacugc

SEQ ID NO: 22968 - RNA, 23 nt, artificial
  Oligomer
uuuauguuugggcagagacugcc

SEQ ID NO: 22969 - RNA, 23 nt, artificial
  Oligomer
uccguugcagcucuuccucucuc

SEQ ID NO: 22970 - RNA, 23 nt, artificial
  Oligomer
ccguugcagcucuuccucucuca

SEQ ID NO: 22971 - RNA, 23 nt, artificial
  Oligomer
cguugcagcucuuccucucucag

SEQ ID NO: 22972 - RNA, 23 nt, artificial
  Oligomer
guugcagcucuuccucucucagc

SEQ ID NO: 22973 - RNA, 23 nt, artificial
  Oligomer
uugcagcucuuccucucucagcc

SEQ ID NO: 22974 - RNA, 23 nt, artificial
  Oligomer
uugagaguuugcaaauuggcaug

SEQ ID NO: 22975 - RNA, 23 nt, artificial
  Oligomer
guucuucaagagaaacaggguuc

SEQ ID NO: 22976 - RNA, 23 nt, artificial
  Oligomer
uucuucaagagaaacaggguuca

SEQ ID NO: 22977 - RNA, 23 nt, artificial
  Oligomer
ucuucaagagaaacaggguucac

SEQ ID NO: 22978 - RNA, 23 nt, artificial
  Oligomer
cuucaagagaaacaggguucaca

SEQ ID NO: 22979 - RNA, 23 nt, artificial
  Oligomer
uucaagagaaacaggguucacaa

SEQ ID NO: 22980 - RNA, 23 nt, artificial
  Oligomer
auaguugaauucuugguucuuag

SEQ ID NO: 22981 - RNA, 23 nt, artificial
  Oligomer
uaguugaauucuugguucuuagc

SEQ ID NO: 22982 - RNA, 23 nt, artificial
  Oligomer
aguugaauucuugguucuuagca

SEQ ID NO: 22983 - RNA, 23 nt, artificial
  Oligomer
guugaauucuugguucuuagcaa

SEQ ID NO: 22984 - RNA, 23 nt, artificial
  Oligomer
uugaauucuugguucuuagcaaa

SEQ ID NO: 22985 - RNA, 23 nt, artificial
  Oligomer
acaguucagaauucaucuggugg

SEQ ID NO: 22986 - RNA, 23 nt, artificial
  Oligomer
caguucagaauucaucuggugga

SEQ ID NO: 22987 - RNA, 23 nt, artificial
  Oligomer
aguucagaauucaucugguggau

SEQ ID NO: 22988 - RNA, 23 nt, artificial
  Oligomer
guucagaauucaucugguggaug

SEQ ID NO: 22989 - RNA, 23 nt, artificial
  Oligomer
uucagaauucaucugguggaugc

SEQ ID NO: 22990 - RNA, 23 nt, artificial
  Oligomer
ccaguauaucugucucuguaugc

SEQ ID NO: 22991 - RNA, 23 nt, artificial
  Oligomer
caguauaucugucucuguaugca

SEQ ID NO: 22992 - RNA, 23 nt, artificial
  Oligomer
aguauaucugucucuguaugcaa

SEQ ID NO: 22993 - RNA, 23 nt, artificial
  Oligomer
guauaucugucucuguaugcaag

SEQ ID NO: 22994 - RNA, 23 nt, artificial
  Oligomer
uauaucugucucuguaugcaagu

SEQ ID NO: 22995 - RNA, 23 nt, artificial
  Oligomer
aggcuuugguuuugagaguuugc

SEQ ID NO: 22996 - RNA, 23 nt, artificial
  Oligomer
ggcuuugguuuugagaguuugca

SEQ ID NO: 22997 - RNA, 23 nt, artificial
  Oligomer
gcuuugguuuugagaguuugcaa

SEQ ID NO: 22998 - RNA, 23 nt, artificial
  Oligomer
cuuugguuuugagaguuugcaaa

SEQ ID NO: 22999 - RNA, 23 nt, artificial
  Oligomer
uuugguuuugagaguuugcaaau

SEQ ID NO: 23000 - RNA, 23 nt, artificial
  Oligomer
cauuuuccuguuuauucaguucu

SEQ ID NO: 23001 - RNA, 23 nt, artificial
  Oligomer
auuuuccuguuuauucaguucuc

SEQ ID NO: 23002 - RNA, 23 nt, artificial
  Oligomer
uuuuccuguuuauucaguucucu

SEQ ID NO: 23003 - RNA, 23 nt, artificial
  Oligomer
uuuccuguuuauucaguucucuc

SEQ ID NO: 23004 - RNA, 23 nt, artificial
  Oligomer
guuuauucaguucucuccacuau

SEQ ID NO: 23005 - RNA, 23 nt, artificial
  Oligomer
uuccuuacugacccugacagagg

SEQ ID NO: 23006 - RNA, 23 nt, artificial
  Oligomer
uccuuacugacccugacagaggg

SEQ ID NO: 23007 - RNA, 23 nt, artificial
  Oligomer
ccuuacugacccugacagaggga

SEQ ID NO: 23008 - RNA, 23 nt, artificial
  Oligomer
cuuacugacccugacagagggau

SEQ ID NO: 23009 - RNA, 23 nt, artificial
  Oligomer
uuacugacccugacagagggaug

SEQ ID NO: 23010 - RNA, 23 nt, artificial
  Oligomer
ucucuagagcauaguaaucacac

SEQ ID NO: 23011 - RNA, 23 nt, artificial
  Oligomer
cucuagagcauaguaaucacacu

SEQ ID NO: 23012 - RNA, 23 nt, artificial
  Oligomer
ucuagagcauaguaaucacacua

SEQ ID NO: 23013 - RNA, 23 nt, artificial
  Oligomer
cuagagcauaguaaucacacuau

SEQ ID NO: 23014 - RNA, 23 nt, artificial
  Oligomer
uagagcauaguaaucacacuauu

SEQ ID NO: 23015 - RNA, 23 nt, artificial
  Oligomer
acuauuacaguacauagaucucu

SEQ ID NO: 23016 - RNA, 23 nt, artificial
  Oligomer
cuauuacaguacauagaucucua

SEQ ID NO: 23017 - RNA, 23 nt, artificial
  Oligomer
uauuacaguacauagaucucuau

SEQ ID NO: 23018 - RNA, 23 nt, artificial
  Oligomer
auuacaguacauagaucucuaug

SEQ ID NO: 23019 - RNA, 23 nt, artificial
  Oligomer
uuacaguacauagaucucuaugu

SEQ ID NO: 23020 - RNA, 23 nt, artificial
  Oligomer
aguuuccagaauacagaagaugg

SEQ ID NO: 23021 - RNA, 23 nt, artificial
  Oligomer
guuuccagaauacagaagauggu

SEQ ID NO: 23022 - RNA, 23 nt, artificial
  Oligomer
uuuccagaauacagaagaugguc

SEQ ID NO: 23023 - RNA, 23 nt, artificial
  Oligomer
uuccagaauacagaagaugguca

SEQ ID NO: 23024 - RNA, 23 nt, artificial
  Oligomer
uccagaauacagaagauggucau

SEQ ID NO: 23025 - RNA, 23 nt, artificial
  Oligomer
gcacugacaguucagaauucauc

SEQ ID NO: 23026 - RNA, 23 nt, artificial
  Oligomer
cacugacaguucagaauucaucu

SEQ ID NO: 23027 - RNA, 23 nt, artificial
  Oligomer
acugacaguucagaauucaucug

SEQ ID NO: 23028 - RNA, 23 nt, artificial
  Oligomer
cugacaguucagaauucaucugg

SEQ ID NO: 23029 - RNA, 23 nt, artificial
  Oligomer
ugacaguucagaauucaucuggu

SEQ ID NO: 23030 - RNA, 23 nt, artificial
  Oligomer
ucucuuugccuaaguauaccuca

SEQ ID NO: 23031 - RNA, 23 nt, artificial
  Oligomer
cucuuugccuaaguauaccucau

SEQ ID NO: 23032 - RNA, 23 nt, artificial
  Oligomer
ucuuugccuaaguauaccucauu

SEQ ID NO: 23033 - RNA, 23 nt, artificial
  Oligomer
cuuugccuaaguauaccucauuc

SEQ ID NO: 23034 - RNA, 23 nt, artificial
  Oligomer
uuugccuaaguauaccucauuca

SEQ ID NO: 23035 - RNA, 23 nt, artificial
  Oligomer
uuauguuugggcagagacugccc

SEQ ID NO: 23036 - RNA, 23 nt, artificial
  Oligomer
uauguuugggcagagacugcccc

SEQ ID NO: 23037 - RNA, 23 nt, artificial
  Oligomer
ugucuuggucuuccuaauuccgu

SEQ ID NO: 23038 - RNA, 23 nt, artificial
  Oligomer
gucuuggucuuccuaauuccguu

SEQ ID NO: 23039 - RNA, 23 nt, artificial
  Oligomer
ucuuggucuuccuaauuccguug

SEQ ID NO: 23040 - RNA, 23 nt, artificial
  Oligomer
cuuggucuuccuaauuccguugc

SEQ ID NO: 23041 - RNA, 23 nt, artificial
  Oligomer
uuggucuuccuaauuccguugca

SEQ ID NO: 23042 - RNA, 23 nt, artificial
  Oligomer
accguuuuccuuacugacccuga

SEQ ID NO: 23043 - RNA, 23 nt, artificial
  Oligomer
ccguuuuccuuacugacccugac

SEQ ID NO: 23044 - RNA, 23 nt, artificial
  Oligomer
cguuuuccuuacugacccugaca

SEQ ID NO: 23045 - RNA, 23 nt, artificial
  Oligomer
guuuuccuuacugacccugacag

SEQ ID NO: 23046 - RNA, 23 nt, artificial
  Oligomer
uuuuccuuacugacccugacaga

SEQ ID NO: 23047 - RNA, 23 nt, artificial
  Oligomer
aaggucauaaauacauaaguccc

SEQ ID NO: 23048 - RNA, 23 nt, artificial
  Oligomer
aggucauaaauacauaaguccca

SEQ ID NO: 23049 - RNA, 23 nt, artificial
  Oligomer
ggucauaaauacauaagucccac

SEQ ID NO: 23050 - RNA, 23 nt, artificial
  Oligomer
gucauaaauacauaagucccacc

SEQ ID NO: 23051 - RNA, 23 nt, artificial
  Oligomer
ucauaaauacauaagucccaccc

SEQ ID NO: 23052 - RNA, 23 nt, artificial
  Oligomer
auacucgauaguugaauucuugg

SEQ ID NO: 23053 - RNA, 23 nt, artificial
  Oligomer
uacucgauaguugaauucuuggu

SEQ ID NO: 23054 - RNA, 23 nt, artificial
  Oligomer
acucgauaguugaauucuugguu

SEQ ID NO: 23055 - RNA, 23 nt, artificial
  Oligomer
cucgauaguugaauucuugguuc

SEQ ID NO: 23056 - RNA, 23 nt, artificial
  Oligomer
ucgauaguugaauucuugguucu

SEQ ID NO: 23057 - RNA, 23 nt, artificial
  Oligomer
gugaucucuuuugguucuuucac

SEQ ID NO: 23058 - RNA, 23 nt, artificial
  Oligomer
ugaucucuuuugguucuuucaca

SEQ ID NO: 23059 - RNA, 23 nt, artificial
  Oligomer
gaucucuuuugguucuuucacag

SEQ ID NO: 23060 - RNA, 23 nt, artificial
  Oligomer
aucucuuuugguucuuucacagc

SEQ ID NO: 23061 - RNA, 23 nt, artificial
  Oligomer
ucaguucuucaagagaaacaggg

SEQ ID NO: 23062 - RNA, 23 nt, artificial
  Oligomer
caguucuucaagagaaacagggu

SEQ ID NO: 23063 - RNA, 23 nt, artificial
  Oligomer
aguucuucaagagaaacaggguu

SEQ ID NO: 23064 - RNA, 23 nt, artificial
  Oligomer
uggcuccagguucuaucucugcc

SEQ ID NO: 23065 - RNA, 23 nt, artificial
  Oligomer
ggcuccagguucuaucucugccu

SEQ ID NO: 23066 - RNA, 23 nt, artificial
  Oligomer
gcuccagguucuaucucugccuc

SEQ ID NO: 23067 - RNA, 23 nt, artificial
  Oligomer
cuccagguucuaucucugccucu

SEQ ID NO: 23068 - RNA, 23 nt, artificial
  Oligomer
uccagguucuaucucugccucuc

SEQ ID NO: 23069 - RNA, 23 nt, artificial
  Oligomer
cagguucuaucucugccucuccu

SEQ ID NO: 23070 - RNA, 23 nt, artificial
  Oligomer
agguucuaucucugccucuccua

SEQ ID NO: 23071 - RNA, 23 nt, artificial
  Oligomer
gguucuaucucugccucuccuaa

SEQ ID NO: 23072 - RNA, 23 nt, artificial
  Oligomer
guucuaucucugccucuccuaau

SEQ ID NO: 23073 - RNA, 23 nt, artificial
  Oligomer
uucuaucucugccucuccuaauu

SEQ ID NO: 23074 - RNA, 23 nt, artificial
  Oligomer
ucauauugcucguaacaucaggg

SEQ ID NO: 23075 - RNA, 23 nt, artificial
  Oligomer
cauauugcucguaacaucaggga

SEQ ID NO: 23076 - RNA, 23 nt, artificial
  Oligomer
auauugcucguaacaucagggaa

SEQ ID NO: 23077 - RNA, 23 nt, artificial
  Oligomer
uauugcucguaacaucagggaau

SEQ ID NO: 23078 - RNA, 23 nt, artificial
  Oligomer
auugcucguaacaucagggaaug

SEQ ID NO: 23079 - RNA, 23 nt, artificial
  Oligomer
auucuugguucuuagcaaaacac

SEQ ID NO: 23080 - RNA, 23 nt, artificial
  Oligomer
uucuugguucuuagcaaaacacu

SEQ ID NO: 23081 - RNA, 23 nt, artificial
  Oligomer
ucuugguucuuagcaaaacacuc

SEQ ID NO: 23082 - RNA, 23 nt, artificial
  Oligomer
cuugguucuuagcaaaacacuca

SEQ ID NO: 23083 - RNA, 23 nt, artificial
  Oligomer
uugguucuuagcaaaacacucau

SEQ ID NO: 23084 - RNA, 23 nt, artificial
  Oligomer
caucugguggaugcgaaucauuc

SEQ ID NO: 23085 - RNA, 23 nt, artificial
  Oligomer
aucugguggaugcgaaucauucc

SEQ ID NO: 23086 - RNA, 23 nt, artificial
  Oligomer
ucugguggaugcgaaucauuccu

SEQ ID NO: 23087 - RNA, 23 nt, artificial
  Oligomer
cugguggaugcgaaucauuccug

SEQ ID NO: 23088 - RNA, 23 nt, artificial
  Oligomer
ugguggaugcgaaucauuccugu

SEQ ID NO: 23089 - RNA, 23 nt, artificial
  Oligomer
agacauuucauguauuucugugg

SEQ ID NO: 23090 - RNA, 23 nt, artificial
  Oligomer
gacauuucauguauuucugugga

SEQ ID NO: 23091 - RNA, 23 nt, artificial
  Oligomer
acauuucauguauuucuguggau

SEQ ID NO: 23092 - RNA, 23 nt, artificial
  Oligomer
cauuucauguauuucuguggauc

SEQ ID NO: 23093 - RNA, 23 nt, artificial
  Oligomer
auuucauguauuucuguggauca

SEQ ID NO: 23094 - RNA, 23 nt, artificial
  Oligomer
aguauugugaucucuuuugguuc

SEQ ID NO: 23095 - RNA, 23 nt, artificial
  Oligomer
guauugugaucucuuuugguucu

SEQ ID NO: 23096 - RNA, 23 nt, artificial
  Oligomer
uauugugaucucuuuugguucuu

SEQ ID NO: 23097 - RNA, 23 nt, artificial
  Oligomer
auugugaucucuuuugguucuuu

SEQ ID NO: 23098 - RNA, 23 nt, artificial
  Oligomer
uugugaucucuuuugguucuuuc

SEQ ID NO: 23099 - RNA, 23 nt, artificial
  Oligomer
aauauuagcaacagcccagauag

SEQ ID NO: 23100 - RNA, 23 nt, artificial
  Oligomer
auauuagcaacagcccagauaga

SEQ ID NO: 23101 - RNA, 23 nt, artificial
  Oligomer
uauuagcaacagcccagauagaa

SEQ ID NO: 23102 - RNA, 23 nt, artificial
  Oligomer
auuagcaacagcccagauagaag

SEQ ID NO: 23103 - RNA, 23 nt, artificial
  Oligomer
uuagcaacagcccagauagaagu

SEQ ID NO: 23104 - RNA, 23 nt, artificial
  Oligomer
uacauagaucucuauguuucaag

SEQ ID NO: 23105 - RNA, 23 nt, artificial
  Oligomer
acauagaucucuauguuucaaga

SEQ ID NO: 23106 - RNA, 23 nt, artificial
  Oligomer
cauagaucucuauguuucaagau

SEQ ID NO: 23107 - RNA, 23 nt, artificial
  Oligomer
auagaucucuauguuucaagaua

SEQ ID NO: 23108 - RNA, 23 nt, artificial
  Oligomer
uagaucucuauguuucaagauau

SEQ ID NO: 23109 - RNA, 23 nt, artificial
  Oligomer
cauaaauacauaagucccaccca

SEQ ID NO: 23110 - RNA, 23 nt, artificial
  Oligomer
auaaauacauaagucccacccag

SEQ ID NO: 23111 - RNA, 23 nt, artificial
  Oligomer
uaaauacauaagucccacccaga

SEQ ID NO: 23112 - RNA, 23 nt, artificial
  Oligomer
aaauacauaagucccacccagac

SEQ ID NO: 23113 - RNA, 23 nt, artificial
  Oligomer
agagaauuaaagucuccucuugg

SEQ ID NO: 23114 - RNA, 23 nt, artificial
  Oligomer
gagaauuaaagucuccucuuggc

SEQ ID NO: 23115 - RNA, 23 nt, artificial
  Oligomer
agaauuaaagucuccucuuggca

SEQ ID NO: 23116 - RNA, 23 nt, artificial
  Oligomer
gaauuaaagucuccucuuggcau

SEQ ID NO: 23117 - RNA, 23 nt, artificial
  Oligomer
aauuaaagucuccucuuggcaua

SEQ ID NO: 23118 - RNA, 23 nt, artificial
  Oligomer
ccacauuuauaagaguugcgagg

SEQ ID NO: 23119 - RNA, 23 nt, artificial
  Oligomer
gucauauugcucguaacaucagg

SEQ ID NO: 23120 - RNA, 23 nt, artificial
  Oligomer
uuaucuugagauuucugcauaac

SEQ ID NO: 23121 - RNA, 23 nt, artificial
  Oligomer
uacauugauacaagcccuugucc

SEQ ID NO: 23122 - RNA, 23 nt, artificial
  Oligomer
acauugauacaagcccuuguccu

SEQ ID NO: 23123 - RNA, 23 nt, artificial
  Oligomer
cauugauacaagcccuuguccuu

SEQ ID NO: 23124 - RNA, 23 nt, artificial
  Oligomer
auugauacaagcccuuguccuug

SEQ ID NO: 23125 - RNA, 23 nt, artificial
  Oligomer
uugauacaagcccuuguccuuga

SEQ ID NO: 23126 - RNA, 23 nt, artificial
  Oligomer
acuguccgaaucaaaacuugugc

SEQ ID NO: 23127 - RNA, 23 nt, artificial
  Oligomer
cuguccgaaucaaaacuugugcg

SEQ ID NO: 23128 - RNA, 23 nt, artificial
  Oligomer
uguccgaaucaaaacuugugcgg

SEQ ID NO: 23129 - RNA, 23 nt, artificial
  Oligomer
guccgaaucaaaacuugugcggc

SEQ ID NO: 23130 - RNA, 23 nt, artificial
  Oligomer
uccgaaucaaaacuugugcggcc

SEQ ID NO: 23131 - RNA, 23 nt, artificial
  Oligomer
cuccuuccauucaucccauuauc

SEQ ID NO: 23132 - RNA, 23 nt, artificial
  Oligomer
uccuuccauucaucccauuauca

SEQ ID NO: 23133 - RNA, 23 nt, artificial
  Oligomer
ccuuccauucaucccauuaucaa

SEQ ID NO: 23134 - RNA, 23 nt, artificial
  Oligomer
cuuccauucaucccauuaucaag

SEQ ID NO: 23135 - RNA, 23 nt, artificial
  Oligomer
aaugucuuuuugccuucuggaag

SEQ ID NO: 23136 - RNA, 23 nt, artificial
  Oligomer
augucuuuuugccuucuggaaga

SEQ ID NO: 23137 - RNA, 23 nt, artificial
  Oligomer
ugucuuuuugccuucuggaagaa

SEQ ID NO: 23138 - RNA, 23 nt, artificial
  Oligomer
gucuuuuugccuucuggaagaaa

SEQ ID NO: 23139 - RNA, 23 nt, artificial
  Oligomer
ucuuuuugccuucuggaagaaau

SEQ ID NO: 23140 - RNA, 23 nt, artificial
  Oligomer
gaauacuuguaugggcuuuacuc

SEQ ID NO: 23141 - RNA, 23 nt, artificial
  Oligomer
aauacuuguaugggcuuuacucu

SEQ ID NO: 23142 - RNA, 23 nt, artificial
  Oligomer
auacuuguaugggcuuuacucuu

SEQ ID NO: 23143 - RNA, 23 nt, artificial
  Oligomer
uacuuguaugggcuuuacucuuu

SEQ ID NO: 23144 - RNA, 23 nt, artificial
  Oligomer
acuuguaugggcuuuacucuuua

SEQ ID NO: 23145 - RNA, 23 nt, artificial
  Oligomer
uguaugcaaguuuccucugguug

SEQ ID NO: 23146 - RNA, 23 nt, artificial
  Oligomer
guaugcaaguuuccucugguugc

SEQ ID NO: 23147 - RNA, 23 nt, artificial
  Oligomer
uaugcaaguuuccucugguugcc

SEQ ID NO: 23148 - RNA, 23 nt, artificial
  Oligomer
augcaaguuuccucugguugccu

SEQ ID NO: 23149 - RNA, 23 nt, artificial
  Oligomer
ugcaaguuuccucugguugccuu

SEQ ID NO: 23150 - RNA, 23 nt, artificial
  Oligomer
agaaguggcuccagguucuaucu

SEQ ID NO: 23151 - RNA, 23 nt, artificial
  Oligomer
gaaguggcuccagguucuaucuc

SEQ ID NO: 23152 - RNA, 23 nt, artificial
  Oligomer
aaguggcuccagguucuaucucu

SEQ ID NO: 23153 - RNA, 23 nt, artificial
  Oligomer
aguggcuccagguucuaucucug

SEQ ID NO: 23154 - RNA, 23 nt, artificial
  Oligomer
gaaauaagcuugaaucuucagag

SEQ ID NO: 23155 - RNA, 23 nt, artificial
  Oligomer
aaauaagcuugaaucuucagagg

SEQ ID NO: 23156 - RNA, 23 nt, artificial
  Oligomer
aauaagcuugaaucuucagagga

SEQ ID NO: 23157 - RNA, 23 nt, artificial
  Oligomer
auaagcuugaaucuucagaggag

SEQ ID NO: 23158 - RNA, 23 nt, artificial
  Oligomer
uaagcuugaaucuucagaggagc

SEQ ID NO: 23159 - RNA, 23 nt, artificial
  Oligomer
gcagauaaaaggcaguuuuccag

SEQ ID NO: 23160 - RNA, 23 nt, artificial
  Oligomer
cagauaaaaggcaguuuuccaga

SEQ ID NO: 23161 - RNA, 23 nt, artificial
  Oligomer
agauaaaaggcaguuuuccagaa

SEQ ID NO: 23162 - RNA, 23 nt, artificial
  Oligomer
gauaaaaggcaguuuuccagaaa

SEQ ID NO: 23163 - RNA, 23 nt, artificial
  Oligomer
auaaaaggcaguuuuccagaaau

SEQ ID NO: 23164 - RNA, 23 nt, artificial
  Oligomer
gguaaugucuuuuugccuucugg

SEQ ID NO: 23165 - RNA, 23 nt, artificial
  Oligomer
guaaugucuuuuugccuucugga

SEQ ID NO: 23166 - RNA, 23 nt, artificial
  Oligomer
uaaugucuuuuugccuucuggaa

SEQ ID NO: 23167 - RNA, 23 nt, artificial
  Oligomer
ggauuuuuucucuuuucuugguc

SEQ ID NO: 23168 - RNA, 23 nt, artificial
  Oligomer
aagauugugaagucucagggucc

SEQ ID NO: 23169 - RNA, 23 nt, artificial
  Oligomer
agauugugaagucucagggucca

SEQ ID NO: 23170 - RNA, 23 nt, artificial
  Oligomer
gauugugaagucucaggguccaa

SEQ ID NO: 23171 - RNA, 23 nt, artificial
  Oligomer
auugugaagucucaggguccaac

SEQ ID NO: 23172 - RNA, 23 nt, artificial
  Oligomer
uugugaagucucaggguccaacu

SEQ ID NO: 23173 - RNA, 23 nt, artificial
  Oligomer
aaacuugugcggcccauauacuu

SEQ ID NO: 23174 - RNA, 23 nt, artificial
  Oligomer
aacuugugcggcccauauacuug

SEQ ID NO: 23175 - RNA, 23 nt, artificial
  Oligomer
acuugugcggcccauauacuugg

SEQ ID NO: 23176 - RNA, 23 nt, artificial
  Oligomer
cuugugcggcccauauacuugga

SEQ ID NO: 23177 - RNA, 23 nt, artificial
  Oligomer
uugugcggcccauauacuuggaa

SEQ ID NO: 23178 - RNA, 23 nt, artificial
  Oligomer
ugugcggcccauauacuuggaau

SEQ ID NO: 23179 - RNA, 23 nt, artificial
  Oligomer
uuugguucuuucacagcuucccc

SEQ ID NO: 23180 - RNA, 23 nt, artificial
  Oligomer
uugguucuuucacagcuucccca

SEQ ID NO: 23181 - RNA, 23 nt, artificial
  Oligomer
ugguucuuucacagcuuccccag

SEQ ID NO: 23182 - RNA, 23 nt, artificial
  Oligomer
cagcuguaauccaaggaaugugg

SEQ ID NO: 23183 - RNA, 23 nt, artificial
  Oligomer
agcuguaauccaaggaauguggu

SEQ ID NO: 23184 - RNA, 23 nt, artificial
  Oligomer
gcuguaauccaaggaaugugguc

SEQ ID NO: 23185 - RNA, 23 nt, artificial
  Oligomer
cuguaauccaaggaauguggucu

SEQ ID NO: 23186 - RNA, 23 nt, artificial
  Oligomer
uguaauccaaggaauguggucug

SEQ ID NO: 23187 - RNA, 23 nt, artificial
  Oligomer
ucugcauaacaccaucauacucg

SEQ ID NO: 23188 - RNA, 23 nt, artificial
  Oligomer
cugcauaacaccaucauacucga

SEQ ID NO: 23189 - RNA, 23 nt, artificial
  Oligomer
ugcauaacaccaucauacucgau

SEQ ID NO: 23190 - RNA, 23 nt, artificial
  Oligomer
gcauaacaccaucauacucgaua

SEQ ID NO: 23191 - RNA, 23 nt, artificial
  Oligomer
cauaacaccaucauacucgauag

SEQ ID NO: 23192 - RNA, 23 nt, artificial
  Oligomer
gggcuuuuugugauggaugauac

SEQ ID NO: 23193 - RNA, 23 nt, artificial
  Oligomer
ggcuuuuugugauggaugauaca

SEQ ID NO: 23194 - RNA, 23 nt, artificial
  Oligomer
gcuuuuugugauggaugauacau

SEQ ID NO: 23195 - RNA, 23 nt, artificial
  Oligomer
cuuuuugugauggaugauacauu

SEQ ID NO: 23196 - RNA, 23 nt, artificial
  Oligomer
uuuuugugauggaugauacauug

SEQ ID NO: 23197 - RNA, 23 nt, artificial
  Oligomer
cccauauacuuggaaugaacacu

SEQ ID NO: 23198 - RNA, 23 nt, artificial
  Oligomer
agcauggcagucuauaacccuug

SEQ ID NO: 23199 - RNA, 23 nt, artificial
  Oligomer
gcauggcagucuauaacccuuga

SEQ ID NO: 23200 - RNA, 23 nt, artificial
  Oligomer
cauggcagucuauaacccuugag

SEQ ID NO: 23201 - RNA, 23 nt, artificial
  Oligomer
auggcagucuauaacccuugagg

SEQ ID NO: 23202 - RNA, 23 nt, artificial
  Oligomer
uggcagucuauaacccuugaggg

SEQ ID NO: 23203 - RNA, 23 nt, artificial
  Oligomer
aucauccaacucaaauuugcuag

SEQ ID NO: 23204 - RNA, 23 nt, artificial
  Oligomer
ucauccaacucaaauuugcuagc

SEQ ID NO: 23205 - RNA, 23 nt, artificial
  Oligomer
cauccaacucaaauuugcuagcc

SEQ ID NO: 23206 - RNA, 23 nt, artificial
  Oligomer
auccaacucaaauuugcuagccc

SEQ ID NO: 23207 - RNA, 23 nt, artificial
  Oligomer
uccaacucaaauuugcuagcccu

SEQ ID NO: 23208 - RNA, 23 nt, artificial
  Oligomer
cuuguaugggcuuuacucuuuaa

SEQ ID NO: 23209 - RNA, 23 nt, artificial
  Oligomer
uuguaugggcuuuacucuuuaau

SEQ ID NO: 23210 - RNA, 23 nt, artificial
  Oligomer
ucacuuuugucgcaugaagaugu

SEQ ID NO: 23211 - RNA, 23 nt, artificial
  Oligomer
cacuuuugucgcaugaagauguc

SEQ ID NO: 23212 - RNA, 23 nt, artificial
  Oligomer
acuuuugucgcaugaagaugucu

SEQ ID NO: 23213 - RNA, 23 nt, artificial
  Oligomer
cuuuugucgcaugaagaugucuu

SEQ ID NO: 23214 - RNA, 23 nt, artificial
  Oligomer
uuuugucgcaugaagaugucuuc

SEQ ID NO: 23215 - RNA, 23 nt, artificial
  Oligomer
gaacuuuuaaaaacacgcugggc

SEQ ID NO: 23216 - RNA, 23 nt, artificial
  Oligomer
caucagaucuuucagguauaugg

SEQ ID NO: 23217 - RNA, 23 nt, artificial
  Oligomer
aucagaucuuucagguauaugga

SEQ ID NO: 23218 - RNA, 23 nt, artificial
  Oligomer
ucagaucuuucagguauauggau

SEQ ID NO: 23219 - RNA, 23 nt, artificial
  Oligomer
cagaucuuucagguauauggauu

SEQ ID NO: 23220 - RNA, 23 nt, artificial
  Oligomer
agaucuuucagguauauggauuu

SEQ ID NO: 23221 - RNA, 23 nt, artificial
  Oligomer
gagauuucugcauaacaccauca

SEQ ID NO: 23222 - RNA, 23 nt, artificial
  Oligomer
agauuucugcauaacaccaucau

SEQ ID NO: 23223 - RNA, 23 nt, artificial
  Oligomer
gauuucugcauaacaccaucaua

SEQ ID NO: 23224 - RNA, 23 nt, artificial
  Oligomer
auuucugcauaacaccaucauac

SEQ ID NO: 23225 - RNA, 23 nt, artificial
  Oligomer
uuucugcauaacaccaucauacu

SEQ ID NO: 23226 - RNA, 23 nt, artificial
  Oligomer
cuucuuagguucuggguaaccgu

SEQ ID NO: 23227 - RNA, 23 nt, artificial
  Oligomer
uucuuagguucuggguaaccgug

SEQ ID NO: 23228 - RNA, 23 nt, artificial
  Oligomer
ucuuagguucuggguaaccgugu

SEQ ID NO: 23229 - RNA, 23 nt, artificial
  Oligomer
cuuagguucuggguaaccgugua

SEQ ID NO: 23230 - RNA, 23 nt, artificial
  Oligomer
uuagguucuggguaaccguguau

SEQ ID NO: 23231 - RNA, 23 nt, artificial
  Oligomer
aaaauacuacuagcucacucagg

SEQ ID NO: 23232 - RNA, 23 nt, artificial
  Oligomer
aaauacuacuagcucacucaggc

SEQ ID NO: 23233 - RNA, 23 nt, artificial
  Oligomer
aauacuacuagcucacucaggcu

SEQ ID NO: 23234 - RNA, 23 nt, artificial
  Oligomer
auacuacuagcucacucaggcuu

SEQ ID NO: 23235 - RNA, 23 nt, artificial
  Oligomer
uacuacuagcucacucaggcuuu

SEQ ID NO: 23236 - RNA, 23 nt, artificial
  Oligomer
ugugucuuggucuuccuaauucc

SEQ ID NO: 23237 - RNA, 23 nt, artificial
  Oligomer
gugucuuggucuuccuaauuccg

SEQ ID NO: 23238 - RNA, 23 nt, artificial
  Oligomer
caaauuuagguuggucugcucau

SEQ ID NO: 23239 - RNA, 23 nt, artificial
  Oligomer
aaauuuagguuggucugcucauu

SEQ ID NO: 23240 - RNA, 23 nt, artificial
  Oligomer
acccuaggccaccguuuuccuua

SEQ ID NO: 23241 - RNA, 23 nt, artificial
  Oligomer
cccuaggccaccguuuuccuuac

SEQ ID NO: 23242 - RNA, 23 nt, artificial
  Oligomer
ccuaggccaccguuuuccuuacu

SEQ ID NO: 23243 - RNA, 23 nt, artificial
  Oligomer
cuaggccaccguuuuccuuacug

SEQ ID NO: 23244 - RNA, 23 nt, artificial
  Oligomer
uaggccaccguuuuccuuacuga

SEQ ID NO: 23245 - RNA, 23 nt, artificial
  Oligomer
aaauuaagagaagaaucugaucu

SEQ ID NO: 23246 - RNA, 23 nt, artificial
  Oligomer
aauuaagagaagaaucugaucug

SEQ ID NO: 23247 - RNA, 23 nt, artificial
  Oligomer
auuaagagaagaaucugaucugg

SEQ ID NO: 23248 - RNA, 23 nt, artificial
  Oligomer
uuaagagaagaaucugaucugga

SEQ ID NO: 23249 - RNA, 23 nt, artificial
  Oligomer
uaagagaagaaucugaucuggag

SEQ ID NO: 23250 - RNA, 23 nt, artificial
  Oligomer
uccauagaauuagacagaaaacc

SEQ ID NO: 23251 - RNA, 23 nt, artificial
  Oligomer
ccauagaauuagacagaaaacca

SEQ ID NO: 23252 - RNA, 23 nt, artificial
  Oligomer
cauagaauuagacagaaaaccau

SEQ ID NO: 23253 - RNA, 23 nt, artificial
  Oligomer
auagaauuagacagaaaaccauc

SEQ ID NO: 23254 - RNA, 23 nt, artificial
  Oligomer
uagaauuagacagaaaaccauca

SEQ ID NO: 23255 - RNA, 23 nt, artificial
  Oligomer
uggaaugaacacugucaaauuuc

SEQ ID NO: 23256 - RNA, 23 nt, artificial
  Oligomer
ggaaugaacacugucaaauuucu

SEQ ID NO: 23257 - RNA, 23 nt, artificial
  Oligomer
gaaugaacacugucaaauuucuc

SEQ ID NO: 23258 - RNA, 23 nt, artificial
  Oligomer
aaugaacacugucaaauuucucu

SEQ ID NO: 23259 - RNA, 23 nt, artificial
  Oligomer
augaacacugucaaauuucucuu

SEQ ID NO: 23260 - RNA, 23 nt, artificial
  Oligomer
aaauuucucuuugccuaaguaua

SEQ ID NO: 23261 - RNA, 23 nt, artificial
  Oligomer
aauuucucuuugccuaaguauac

SEQ ID NO: 23262 - RNA, 23 nt, artificial
  Oligomer
auuucucuuugccuaaguauacc

SEQ ID NO: 23263 - RNA, 23 nt, artificial
  Oligomer
uuucucuuugccuaaguauaccu

SEQ ID NO: 23264 - RNA, 23 nt, artificial
  Oligomer
uucucuuugccuaaguauaccuc

SEQ ID NO: 23265 - RNA, 23 nt, artificial
  Oligomer
aguauaccucauucagaaccaag

SEQ ID NO: 23266 - RNA, 23 nt, artificial
  Oligomer
guauaccucauucagaaccaagu

SEQ ID NO: 23267 - RNA, 23 nt, artificial
  Oligomer
uauaccucauucagaaccaaguu

SEQ ID NO: 23268 - RNA, 23 nt, artificial
  Oligomer
auaccucauucagaaccaaguuu

SEQ ID NO: 23269 - RNA, 23 nt, artificial
  Oligomer
uaccucauucagaaccaaguuuu

SEQ ID NO: 23270 - RNA, 23 nt, artificial
  Oligomer
ugucuagcauggcagucuauaac

SEQ ID NO: 23271 - RNA, 23 nt, artificial
  Oligomer
gucuagcauggcagucuauaacc

SEQ ID NO: 23272 - RNA, 23 nt, artificial
  Oligomer
ucuagcauggcagucuauaaccc

SEQ ID NO: 23273 - RNA, 23 nt, artificial
  Oligomer
cuagcauggcagucuauaacccu

SEQ ID NO: 23274 - RNA, 23 nt, artificial
  Oligomer
uagcauggcagucuauaacccuu

SEQ ID NO: 23275 - RNA, 23 nt, artificial
  Oligomer
acuauccaucuguugcuuguuuc

SEQ ID NO: 23276 - RNA, 23 nt, artificial
  Oligomer
cuauccaucuguugcuuguuuca

SEQ ID NO: 23277 - RNA, 23 nt, artificial
  Oligomer
uauccaucuguugcuuguuucaa

SEQ ID NO: 23278 - RNA, 23 nt, artificial
  Oligomer
auccaucuguugcuuguuucaag

SEQ ID NO: 23279 - RNA, 23 nt, artificial
  Oligomer
uccaucuguugcuuguuucaaga

SEQ ID NO: 23280 - RNA, 23 nt, artificial
  Oligomer
gcucauuguugccuguacccuag

SEQ ID NO: 23281 - RNA, 23 nt, artificial
  Oligomer
cucauuguugccuguacccuagg

SEQ ID NO: 23282 - RNA, 23 nt, artificial
  Oligomer
ucauuguugccuguacccuaggc

SEQ ID NO: 23283 - RNA, 23 nt, artificial
  Oligomer
cauuguugccuguacccuaggcc

SEQ ID NO: 23284 - RNA, 23 nt, artificial
  Oligomer
auuguugccuguacccuaggcca

SEQ ID NO: 23285 - RNA, 23 nt, artificial
  Oligomer
gacuuuucucuagagcauaguaa

SEQ ID NO: 23286 - RNA, 23 nt, artificial
  Oligomer
acuuuucucuagagcauaguaau

SEQ ID NO: 23287 - RNA, 23 nt, artificial
  Oligomer
cuuuucucuagagcauaguaauc

SEQ ID NO: 23288 - RNA, 23 nt, artificial
  Oligomer
uuuucucuagagcauaguaauca

SEQ ID NO: 23289 - RNA, 23 nt, artificial
  Oligomer
uuucucuagagcauaguaaucac

SEQ ID NO: 23290 - RNA, 23 nt, artificial
  Oligomer
uagaauucugggcagauaaaagg

SEQ ID NO: 23291 - RNA, 23 nt, artificial
  Oligomer
agaauucugggcagauaaaaggc

SEQ ID NO: 23292 - RNA, 23 nt, artificial
  Oligomer
gaauucugggcagauaaaaggca

SEQ ID NO: 23293 - RNA, 23 nt, artificial
  Oligomer
aauucugggcagauaaaaggcag

SEQ ID NO: 23294 - RNA, 23 nt, artificial
  Oligomer
auucugggcagauaaaaggcagu

SEQ ID NO: 23295 - RNA, 23 nt, artificial
  Oligomer
gggcuucaucagaucuuucaggu

SEQ ID NO: 23296 - RNA, 23 nt, artificial
  Oligomer
ggcuucaucagaucuuucaggua

SEQ ID NO: 23297 - RNA, 23 nt, artificial
  Oligomer
gcuucaucagaucuuucagguau

SEQ ID NO: 23298 - RNA, 23 nt, artificial
  Oligomer
cuucaucagaucuuucagguaua

SEQ ID NO: 23299 - RNA, 23 nt, artificial
  Oligomer
uucaucagaucuuucagguauau

SEQ ID NO: 23300 - RNA, 23 nt, artificial
  Oligomer
cuuggucuguucacucucuuccc

SEQ ID NO: 23301 - RNA, 23 nt, artificial
  Oligomer
uuggucuguucacucucuucccu

SEQ ID NO: 23302 - RNA, 23 nt, artificial
  Oligomer
agaauuagacagaaaaccaucac

SEQ ID NO: 23303 - RNA, 23 nt, artificial
  Oligomer
gaauuagacagaaaaccaucaca

SEQ ID NO: 23304 - RNA, 23 nt, artificial
  Oligomer
aauuagacagaaaaccaucacac

SEQ ID NO: 23305 - RNA, 23 nt, artificial
  Oligomer
auuagacagaaaaccaucacaca

SEQ ID NO: 23306 - RNA, 23 nt, artificial
  Oligomer
uuagacagaaaaccaucacacau

SEQ ID NO: 23307 - RNA, 23 nt, artificial
  Oligomer
caguuuccagaauacagaagaug

SEQ ID NO: 23308 - RNA, 23 nt, artificial
  Oligomer
uggguaaccguguauagaugagc

SEQ ID NO: 23309 - RNA, 23 nt, artificial
  Oligomer
ggguaaccguguauagaugagca

SEQ ID NO: 23310 - RNA, 23 nt, artificial
  Oligomer
gguaaccguguauagaugagcag

SEQ ID NO: 23311 - RNA, 23 nt, artificial
  Oligomer
guaaccguguauagaugagcagg

SEQ ID NO: 23312 - RNA, 23 nt, artificial
  Oligomer
uaaccguguauagaugagcaggu

SEQ ID NO: 23313 - RNA, 23 nt, artificial
  Oligomer
gaguuugcaaauuggcauggcag

SEQ ID NO: 23314 - RNA, 23 nt, artificial
  Oligomer
aguuugcaaauuggcauggcagg

SEQ ID NO: 23315 - RNA, 23 nt, artificial
  Oligomer
guuugcaaauuggcauggcaggu

SEQ ID NO: 23316 - RNA, 23 nt, artificial
  Oligomer
uuugcaaauuggcauggcagguc

SEQ ID NO: 23317 - RNA, 23 nt, artificial
  Oligomer
uugcaaauuggcauggcaggucu

SEQ ID NO: 23318 - RNA, 23 nt, artificial
  Oligomer
uuuccuuacugacccugacagag

SEQ ID NO: 23319 - RNA, 23 nt, artificial
  Oligomer
cugaucuggaggagguauugguc

SEQ ID NO: 23320 - RNA, 23 nt, artificial
  Oligomer
ugaucuggaggagguauuggucc

SEQ ID NO: 23321 - RNA, 23 nt, artificial
  Oligomer
gaucuggaggagguauugguccu

SEQ ID NO: 23322 - RNA, 23 nt, artificial
  Oligomer
aucuggaggagguauugguccua

SEQ ID NO: 23323 - RNA, 23 nt, artificial
  Oligomer
ucuggaggagguauugguccuaa

SEQ ID NO: 23324 - RNA, 23 nt, artificial
  Oligomer
cucuucccucuccauuguguugg

SEQ ID NO: 23325 - RNA, 23 nt, artificial
  Oligomer
ucuucccucuccauuguguuggu

SEQ ID NO: 23326 - RNA, 23 nt, artificial
  Oligomer
cuucccucuccauuguguugguu

SEQ ID NO: 23327 - RNA, 23 nt, artificial
  Oligomer
uucccucuccauuguguugguuc

SEQ ID NO: 23328 - RNA, 23 nt, artificial
  Oligomer
ucccucuccauuguguugguucc

SEQ ID NO: 23329 - RNA, 23 nt, artificial
  Oligomer
uucuuccauuuccauagaauuag

SEQ ID NO: 23330 - RNA, 23 nt, artificial
  Oligomer
ucuuccauuuccauagaauuaga

SEQ ID NO: 23331 - RNA, 23 nt, artificial
  Oligomer
cuuccauuuccauagaauuagac

SEQ ID NO: 23332 - RNA, 23 nt, artificial
  Oligomer
uuccauuuccauagaauuagaca

SEQ ID NO: 23333 - RNA, 23 nt, artificial
  Oligomer
auggucauauugcucguaacauc

SEQ ID NO: 23334 - RNA, 23 nt, artificial
  Oligomer
uggucauauugcucguaacauca

SEQ ID NO: 23335 - RNA, 23 nt, artificial
  Oligomer
ggucauauugcucguaacaucag

SEQ ID NO: 23336 - RNA, 23 nt, artificial
  Oligomer
ugagauuucugcauaacaccauc

SEQ ID NO: 23337 - RNA, 23 nt, artificial
  Oligomer
ugugaagucucaggguccaacug

SEQ ID NO: 23338 - RNA, 23 nt, artificial
  Oligomer
gugaagucucaggguccaacugu

SEQ ID NO: 23339 - RNA, 23 nt, artificial
  Oligomer
ugaagucucaggguccaacuguc

SEQ ID NO: 23340 - RNA, 23 nt, artificial
  Oligomer
caaauuucucuuugccuaaguau

SEQ ID NO: 23341 - RNA, 23 nt, artificial
  Oligomer
cccuuagugaucccaccuuagag

SEQ ID NO: 23342 - RNA, 23 nt, artificial
  Oligomer
ccuuagugaucccaccuuagagc

SEQ ID NO: 23343 - RNA, 23 nt, artificial
  Oligomer
cuuagugaucccaccuuagagcc

SEQ ID NO: 23344 - RNA, 23 nt, artificial
  Oligomer
uuagugaucccaccuuagagcca

SEQ ID NO: 23345 - RNA, 23 nt, artificial
  Oligomer
uagugaucccaccuuagagccag

SEQ ID NO: 23346 - RNA, 23 nt, artificial
  Oligomer
cugcuuccaggaagaugacaucc

SEQ ID NO: 23347 - RNA, 23 nt, artificial
  Oligomer
ugcuuccaggaagaugacauccc

SEQ ID NO: 23348 - RNA, 23 nt, artificial
  Oligomer
gcuuccaggaagaugacauccca

SEQ ID NO: 23349 - RNA, 23 nt, artificial
  Oligomer
cuuccaggaagaugacaucccaa

SEQ ID NO: 23350 - RNA, 23 nt, artificial
  Oligomer
uuccaggaagaugacaucccaau

SEQ ID NO: 23351 - RNA, 23 nt, artificial
  Oligomer
gaagaugacaucccaauaacuug

SEQ ID NO: 23352 - RNA, 23 nt, artificial
  Oligomer
aagaugacaucccaauaacuugg

SEQ ID NO: 23353 - RNA, 23 nt, artificial
  Oligomer
agaugacaucccaauaacuuggg

SEQ ID NO: 23354 - RNA, 23 nt, artificial
  Oligomer
gaugacaucccaauaacuugggu

SEQ ID NO: 23355 - RNA, 23 nt, artificial
  Oligomer
augacaucccaauaacuugggua

SEQ ID NO: 23356 - RNA, 23 nt, artificial
  Oligomer
guucacaagcucuggcauuuucc

SEQ ID NO: 23357 - RNA, 23 nt, artificial
  Oligomer
uucacaagcucuggcauuuuccu

SEQ ID NO: 23358 - RNA, 23 nt, artificial
  Oligomer
ucacaagcucuggcauuuuccug

SEQ ID NO: 23359 - RNA, 23 nt, artificial
  Oligomer
cacaagcucuggcauuuuccugu

SEQ ID NO: 23360 - RNA, 23 nt, artificial
  Oligomer
acaagcucuggcauuuuccuguu

SEQ ID NO: 23361 - RNA, 23 nt, artificial
  Oligomer
gcauuuuccuguuuauucaguuc

SEQ ID NO: 23362 - RNA, 23 nt, artificial
  Oligomer
ccaaauuuagguuggucugcuca

SEQ ID NO: 23363 - RNA, 23 nt, artificial
  Oligomer
uggaugauacauugauacaagcc

SEQ ID NO: 23364 - RNA, 23 nt, artificial
  Oligomer
ggaugauacauugauacaagccc

SEQ ID NO: 23365 - RNA, 23 nt, artificial
  Oligomer
gaugauacauugauacaagcccu

SEQ ID NO: 23366 - RNA, 23 nt, artificial
  Oligomer
augauacauugauacaagcccuu

SEQ ID NO: 23367 - RNA, 23 nt, artificial
  Oligomer
ugauacauugauacaagcccuug

SEQ ID NO: 23368 - RNA, 23 nt, artificial
  Oligomer
uugguuuugagaguuugcaaauu

SEQ ID NO: 23369 - RNA, 23 nt, artificial
  Oligomer
cuccucaauauuagcaacagccc

SEQ ID NO: 23370 - RNA, 23 nt, artificial
  Oligomer
uccucaauauuagcaacagccca

SEQ ID NO: 23371 - RNA, 23 nt, artificial
  Oligomer
ccucaauauuagcaacagcccag

SEQ ID NO: 23372 - RNA, 23 nt, artificial
  Oligomer
cucaauauuagcaacagcccaga

SEQ ID NO: 23373 - RNA, 23 nt, artificial
  Oligomer
ucaauauuagcaacagcccagau

SEQ ID NO: 23374 - RNA, 23 nt, artificial
  Oligomer
uuauuuccaggucaugagccauu

SEQ ID NO: 23375 - RNA, 23 nt, artificial
  Oligomer
uauuuccaggucaugagccauua

SEQ ID NO: 23376 - RNA, 23 nt, artificial
  Oligomer
auuuccaggucaugagccauuaa

SEQ ID NO: 23377 - RNA, 23 nt, artificial
  Oligomer
uuuccaggucaugagccauuaag

SEQ ID NO: 23378 - RNA, 23 nt, artificial
  Oligomer
uuccaggucaugagccauuaagc

SEQ ID NO: 23379 - RNA, 23 nt, artificial
  Oligomer
ucucuucccucuccauuguguug

SEQ ID NO: 23380 - RNA, 23 nt, artificial
  Oligomer
uagguucuggguaaccguguaua

SEQ ID NO: 23381 - RNA, 23 nt, artificial
  Oligomer
gaaauugguacuauuucagguug

SEQ ID NO: 23382 - RNA, 23 nt, artificial
  Oligomer
aaauugguacuauuucagguuga

SEQ ID NO: 23383 - RNA, 23 nt, artificial
  Oligomer
aauugguacuauuucagguugac

SEQ ID NO: 23384 - RNA, 23 nt, artificial
  Oligomer
auugguacuauuucagguugacu

SEQ ID NO: 23385 - RNA, 23 nt, artificial
  Oligomer
aaucauuccugugggcuuuuugu

SEQ ID NO: 23386 - RNA, 23 nt, artificial
  Oligomer
agaguucucuuuauguuugggca

SEQ ID NO: 23387 - RNA, 23 nt, artificial
  Oligomer
gaguucucuuuauguuugggcag

SEQ ID NO: 23388 - RNA, 23 nt, artificial
  Oligomer
aguucucuuuauguuugggcaga

SEQ ID NO: 23389 - RNA, 23 nt, artificial
  Oligomer
guucucuuuauguuugggcagag

SEQ ID NO: 23390 - RNA, 23 nt, artificial
  Oligomer
uucucuuuauguuugggcagaga

SEQ ID NO: 23391 - RNA, 23 nt, artificial
  Oligomer
ucaaagucauuucucccaguaua

SEQ ID NO: 23392 - RNA, 23 nt, artificial
  Oligomer
ucugucucuguaugcaaguuucc

SEQ ID NO: 23393 - RNA, 23 nt, artificial
  Oligomer
cugucucuguaugcaaguuuccu

SEQ ID NO: 23394 - RNA, 23 nt, artificial
  Oligomer
acucaaauuugcuagcccuaugc

SEQ ID NO: 23395 - RNA, 23 nt, artificial
  Oligomer
cucaaauuugcuagcccuaugcu

SEQ ID NO: 23396 - RNA, 23 nt, artificial
  Oligomer
ucaaauuugcuagcccuaugcug

SEQ ID NO: 23397 - RNA, 23 nt, artificial
  Oligomer
ucccauuaucaaggugauggcuc

SEQ ID NO: 23398 - RNA, 23 nt, artificial
  Oligomer
cccauuaucaaggugauggcucu

SEQ ID NO: 23399 - RNA, 23 nt, artificial
  Oligomer
ccauuaucaaggugauggcucuc

SEQ ID NO: 23400 - RNA, 23 nt, artificial
  Oligomer
cauuaucaaggugauggcucucc

SEQ ID NO: 23401 - RNA, 23 nt, artificial
  Oligomer
auuaucaaggugauggcucuccc

SEQ ID NO: 23402 - RNA, 23 nt, artificial
  Oligomer
ucaguucucuccacuauggcuug

SEQ ID NO: 23403 - RNA, 23 nt, artificial
  Oligomer
ggccaccguuuuccuuacugacc

SEQ ID NO: 23404 - RNA, 23 nt, artificial
  Oligomer
gccaccguuuuccuuacugaccc

SEQ ID NO: 23405 - RNA, 23 nt, artificial
  Oligomer
ccaccguuuuccuuacugacccu

SEQ ID NO: 23406 - RNA, 23 nt, artificial
  Oligomer
caccguuuuccuuacugacccug

SEQ ID NO: 23407 - RNA, 23 nt, artificial
  Oligomer
uuagucacagguacacacaaaau

SEQ ID NO: 23408 - RNA, 23 nt, artificial
  Oligomer
ggccaucacaaagagaauguuac

SEQ ID NO: 23409 - RNA, 23 nt, artificial
  Oligomer
gccaucacaaagagaauguuacu

SEQ ID NO: 23410 - RNA, 23 nt, artificial
  Oligomer
ccaucacaaagagaauguuacuc

SEQ ID NO: 23411 - RNA, 23 nt, artificial
  Oligomer
caucacaaagagaauguuacuca

SEQ ID NO: 23412 - RNA, 23 nt, artificial
  Oligomer
aucacaaagagaauguuacucag

SEQ ID NO: 23413 - RNA, 23 nt, artificial
  Oligomer
cuuuuugccuucuggaagaaauc

SEQ ID NO: 23414 - RNA, 23 nt, artificial
  Oligomer
uuuuugccuucuggaagaaauca

SEQ ID NO: 23415 - RNA, 23 nt, artificial
  Oligomer
uuuugccuucuggaagaaaucaa

SEQ ID NO: 23416 - RNA, 23 nt, artificial
  Oligomer
uuugccuucuggaagaaaucaaa

SEQ ID NO: 23417 - RNA, 23 nt, artificial
  Oligomer
uuugucgcaugaagaugucuucg

SEQ ID NO: 23418 - RNA, 23 nt, artificial
  Oligomer
uugucgcaugaagaugucuucga

SEQ ID NO: 23419 - RNA, 23 nt, artificial
  Oligomer
ugucgcaugaagaugucuucgaa

SEQ ID NO: 23420 - RNA, 23 nt, artificial
  Oligomer
uccauuguguugguuccacauuu

SEQ ID NO: 23421 - RNA, 23 nt, artificial
  Oligomer
ccauuguguugguuccacauuua

SEQ ID NO: 23422 - RNA, 23 nt, artificial
  Oligomer
cauuguguugguuccacauuuau

SEQ ID NO: 23423 - RNA, 23 nt, artificial
  Oligomer
auuguguugguuccacauuuaua

SEQ ID NO: 23424 - RNA, 23 nt, artificial
  Oligomer
uuguguugguuccacauuuauaa

SEQ ID NO: 23425 - RNA, 23 nt, artificial
  Oligomer
uucugcauaacaccaucauacuc

SEQ ID NO: 23426 - RNA, 23 nt, artificial
  Oligomer
ccucauucagaaccaaguuuucc

SEQ ID NO: 23427 - RNA, 23 nt, artificial
  Oligomer
ucagaaccaaguuuuccuggucc

SEQ ID NO: 23428 - RNA, 23 nt, artificial
  Oligomer
gaacauuuuuguggcucaggcuc

SEQ ID NO: 23429 - RNA, 23 nt, artificial
  Oligomer
acaaucauccaacucaaauuugc

SEQ ID NO: 23430 - RNA, 23 nt, artificial
  Oligomer
caaucauccaacucaaauuugcu

SEQ ID NO: 23431 - RNA, 23 nt, artificial
  Oligomer
aaucauccaacucaaauuugcua

SEQ ID NO: 23432 - RNA, 23 nt, artificial
  Oligomer
uucauguauuucuguggaucaag

SEQ ID NO: 23433 - RNA, 23 nt, artificial
  Oligomer
ucauguauuucuguggaucaaga

SEQ ID NO: 23434 - RNA, 23 nt, artificial
  Oligomer
cauguauuucuguggaucaagau

SEQ ID NO: 23435 - RNA, 23 nt, artificial
  Oligomer
auguauuucuguggaucaagauc

SEQ ID NO: 23436 - RNA, 23 nt, artificial
  Oligomer
uguauuucuguggaucaagaucu

SEQ ID NO: 23437 - RNA, 23 nt, artificial
  Oligomer
auacauaagucccacccagacug

SEQ ID NO: 23438 - RNA, 23 nt, artificial
  Oligomer
uacauaagucccacccagacuga

SEQ ID NO: 23439 - RNA, 23 nt, artificial
  Oligomer
acauaagucccacccagacugag

SEQ ID NO: 23440 - RNA, 23 nt, artificial
  Oligomer
cauaagucccacccagacugagg

SEQ ID NO: 23441 - RNA, 23 nt, artificial
  Oligomer
auaagucccacccagacugagga

SEQ ID NO: 23442 - RNA, 23 nt, artificial
  Oligomer
uugccuucuggaagaaaucaaaa

SEQ ID NO: 23443 - RNA, 23 nt, artificial
  Oligomer
gagaauguuacucagucccauag

SEQ ID NO: 23444 - RNA, 23 nt, artificial
  Oligomer
agaauguuacucagucccauagu

SEQ ID NO: 23445 - RNA, 23 nt, artificial
  Oligomer
gaauguuacucagucccauagug

SEQ ID NO: 23446 - RNA, 23 nt, artificial
  Oligomer
ucacucucuucccucuccauugu

SEQ ID NO: 23447 - RNA, 23 nt, artificial
  Oligomer
cccucuccauuguguugguucca

SEQ ID NO: 23448 - RNA, 23 nt, artificial
  Oligomer
ccucuccauuguguugguuccac

SEQ ID NO: 23449 - RNA, 23 nt, artificial
  Oligomer
cucuccauuguguugguuccaca

SEQ ID NO: 23450 - RNA, 23 nt, artificial
  Oligomer
ucuccauuguguugguuccacau

SEQ ID NO: 23451 - RNA, 23 nt, artificial
  Oligomer
gaagauaaaagccgcgucuuguc

SEQ ID NO: 23452 - RNA, 23 nt, artificial
  Oligomer
aagauaaaagccgcgucuuguca

SEQ ID NO: 23453 - RNA, 23 nt, artificial
  Oligomer
agauaaaagccgcgucuugucag

SEQ ID NO: 23454 - RNA, 23 nt, artificial
  Oligomer
gauaaaagccgcgucuugucagu

SEQ ID NO: 23455 - RNA, 23 nt, artificial
  Oligomer
auaaaagccgcgucuugucaguu

SEQ ID NO: 23456 - RNA, 23 nt, artificial
  Oligomer
ugcgaaucauuccugugggcuuu

SEQ ID NO: 23457 - RNA, 23 nt, artificial
  Oligomer
acugucaaauuucucuuugccua

SEQ ID NO: 23458 - RNA, 23 nt, artificial
  Oligomer
cugucaaauuucucuuugccuaa

SEQ ID NO: 23459 - RNA, 23 nt, artificial
  Oligomer
ugucaaauuucucuuugccuaag

SEQ ID NO: 23460 - RNA, 23 nt, artificial
  Oligomer
gucaaauuucucuuugccuaagu

SEQ ID NO: 23461 - RNA, 23 nt, artificial
  Oligomer
ucaaauuucucuuugccuaagua

SEQ ID NO: 23462 - RNA, 23 nt, artificial
  Oligomer
ugccuaaguauaccucauucaga

SEQ ID NO: 23463 - RNA, 23 nt, artificial
  Oligomer
gccuaaguauaccucauucagaa

SEQ ID NO: 23464 - RNA, 23 nt, artificial
  Oligomer
ccuaaguauaccucauucagaac

SEQ ID NO: 23465 - RNA, 23 nt, artificial
  Oligomer
cuaaguauaccucauucagaacc

SEQ ID NO: 23466 - RNA, 23 nt, artificial
  Oligomer
uaaguauaccucauucagaacca

SEQ ID NO: 23467 - RNA, 23 nt, artificial
  Oligomer
aaaauaaaggaacauuuuugugg

SEQ ID NO: 23468 - RNA, 23 nt, artificial
  Oligomer
aaauaaaggaacauuuuuguggc

SEQ ID NO: 23469 - RNA, 23 nt, artificial
  Oligomer
aauaaaggaacauuuuuguggcu

SEQ ID NO: 23470 - RNA, 23 nt, artificial
  Oligomer
auaaaggaacauuuuuguggcuc

SEQ ID NO: 23471 - RNA, 23 nt, artificial
  Oligomer
uaaaggaacauuuuuguggcuca

SEQ ID NO: 23472 - RNA, 23 nt, artificial
  Oligomer
cagcucugcuuccaggaagauga

SEQ ID NO: 23473 - RNA, 23 nt, artificial
  Oligomer
agcucugcuuccaggaagaugac

SEQ ID NO: 23474 - RNA, 23 nt, artificial
  Oligomer
gcucugcuuccaggaagaugaca

SEQ ID NO: 23475 - RNA, 23 nt, artificial
  Oligomer
cucugcuuccaggaagaugacau

SEQ ID NO: 23476 - RNA, 23 nt, artificial
  Oligomer
ucugcuuccaggaagaugacauc

SEQ ID NO: 23477 - RNA, 23 nt, artificial
  Oligomer
ccaucuguugcuuguuucaagac

SEQ ID NO: 23478 - RNA, 23 nt, artificial
  Oligomer
caucuguugcuuguuucaagacu

SEQ ID NO: 23479 - RNA, 23 nt, artificial
  Oligomer
aucuguugcuuguuucaagacuu

SEQ ID NO: 23480 - RNA, 23 nt, artificial
  Oligomer
ugagaguuugcaaauuggcaugg

SEQ ID NO: 23481 - RNA, 23 nt, artificial
  Oligomer
gccaucucacuagucaguucuuc

SEQ ID NO: 23482 - RNA, 23 nt, artificial
  Oligomer
ccaucucacuagucaguucuuca

SEQ ID NO: 23483 - RNA, 23 nt, artificial
  Oligomer
caucucacuagucaguucuucaa

SEQ ID NO: 23484 - RNA, 23 nt, artificial
  Oligomer
aucucacuagucaguucuucaag

SEQ ID NO: 23485 - RNA, 23 nt, artificial
  Oligomer
ucucacuagucaguucuucaaga

SEQ ID NO: 23486 - RNA, 23 nt, artificial
  Oligomer
cugcucauuguugccuguacccu

SEQ ID NO: 23487 - RNA, 23 nt, artificial
  Oligomer
ugcucauuguugccuguacccua

SEQ ID NO: 23488 - RNA, 23 nt, artificial
  Oligomer
aguuguuuagucacagguacaca

SEQ ID NO: 23489 - RNA, 23 nt, artificial
  Oligomer
gaguuacagggaggcuauuccac

SEQ ID NO: 23490 - RNA, 23 nt, artificial
  Oligomer
aguuacagggaggcuauuccacu

SEQ ID NO: 23491 - RNA, 23 nt, artificial
  Oligomer
guuacagggaggcuauuccacuu

SEQ ID NO: 23492 - RNA, 23 nt, artificial
  Oligomer
uuacagggaggcuauuccacuua

SEQ ID NO: 23493 - RNA, 23 nt, artificial
  Oligomer
uacagggaggcuauuccacuuag

SEQ ID NO: 23494 - RNA, 23 nt, artificial
  Oligomer
guccucaagcucuauagagaaag

SEQ ID NO: 23495 - RNA, 23 nt, artificial
  Oligomer
uccucaagcucuauagagaaagg

SEQ ID NO: 23496 - RNA, 23 nt, artificial
  Oligomer
ccucaagcucuauagagaaaggu

SEQ ID NO: 23497 - RNA, 23 nt, artificial
  Oligomer
cucaagcucuauagagaaaggug

SEQ ID NO: 23498 - RNA, 23 nt, artificial
  Oligomer
ucaagcucuauagagaaagguga

SEQ ID NO: 23499 - RNA, 23 nt, artificial
  Oligomer
gaaguuagcaagcacugacaguu

SEQ ID NO: 23500 - RNA, 23 nt, artificial
  Oligomer
aaguuagcaagcacugacaguuc

SEQ ID NO: 23501 - RNA, 23 nt, artificial
  Oligomer
aguuagcaagcacugacaguuca

SEQ ID NO: 23502 - RNA, 23 nt, artificial
  Oligomer
guuagcaagcacugacaguucag

SEQ ID NO: 23503 - RNA, 23 nt, artificial
  Oligomer
uuagcaagcacugacaguucaga

SEQ ID NO: 23504 - RNA, 23 nt, artificial
  Oligomer
ccgaaucaaaacuugugcggccc

SEQ ID NO: 23505 - RNA, 23 nt, artificial
  Oligomer
cgaaucaaaacuugugcggccca

SEQ ID NO: 23506 - RNA, 23 nt, artificial
  Oligomer
gaaucaaaacuugugcggcccau

SEQ ID NO: 23507 - RNA, 23 nt, artificial
  Oligomer
aaucaaaacuugugcggcccaua

SEQ ID NO: 23508 - RNA, 23 nt, artificial
  Oligomer
aucaaaacuugugcggcccauau

SEQ ID NO: 23509 - RNA, 23 nt, artificial
  Oligomer
aaccaaguuuuccugguccugcc

SEQ ID NO: 23510 - RNA, 23 nt, artificial
  Oligomer
accaaguuuuccugguccugcca

SEQ ID NO: 23511 - RNA, 23 nt, artificial
  Oligomer
ccaaguuuuccugguccugccaa

SEQ ID NO: 23512 - RNA, 23 nt, artificial
  Oligomer
caaguuuuccugguccugccaaa

SEQ ID NO: 23513 - RNA, 23 nt, artificial
  Oligomer
aaguuuuccugguccugccaaaa

SEQ ID NO: 23514 - RNA, 23 nt, artificial
  Oligomer
auuacauggacaagcuugucuag

SEQ ID NO: 23515 - RNA, 23 nt, artificial
  Oligomer
aagcuugucuagcauggcagucu

SEQ ID NO: 23516 - RNA, 23 nt, artificial
  Oligomer
agcuugucuagcauggcagucua

SEQ ID NO: 23517 - RNA, 23 nt, artificial
  Oligomer
gcuugucuagcauggcagucuau

SEQ ID NO: 23518 - RNA, 23 nt, artificial
  Oligomer
cuugucuagcauggcagucuaua

SEQ ID NO: 23519 - RNA, 23 nt, artificial
  Oligomer
uugucuagcauggcagucuauaa

SEQ ID NO: 23520 - RNA, 23 nt, artificial
  Oligomer
gccaaaauacuacuagcucacuc

SEQ ID NO: 23521 - RNA, 23 nt, artificial
  Oligomer
ccaaaauacuacuagcucacuca

SEQ ID NO: 23522 - RNA, 23 nt, artificial
  Oligomer
caaaauacuacuagcucacucag

SEQ ID NO: 23523 - RNA, 23 nt, artificial
  Oligomer
accuuagagccagguuuucaaag

SEQ ID NO: 23524 - RNA, 23 nt, artificial
  Oligomer
ccuuagagccagguuuucaaagu

SEQ ID NO: 23525 - RNA, 23 nt, artificial
  Oligomer
cuuagagccagguuuucaaaguc

SEQ ID NO: 23526 - RNA, 23 nt, artificial
  Oligomer
uuagagccagguuuucaaaguca

SEQ ID NO: 23527 - RNA, 23 nt, artificial
  Oligomer
uagagccagguuuucaaagucau

SEQ ID NO: 23528 - RNA, 23 nt, artificial
  Oligomer
caaguuuccucugguugccuuga

SEQ ID NO: 23529 - RNA, 23 nt, artificial
  Oligomer
aaguuuccucugguugccuugag

SEQ ID NO: 23530 - RNA, 23 nt, artificial
  Oligomer
aguuuccucugguugccuugagc

SEQ ID NO: 23531 - RNA, 23 nt, artificial
  Oligomer
guuuccucugguugccuugagca

SEQ ID NO: 23532 - RNA, 23 nt, artificial
  Oligomer
uuuccucugguugccuugagcaa

SEQ ID NO: 23533 - RNA, 23 nt, artificial
  Oligomer
aaacugcugucugucuuaugucc

SEQ ID NO: 23534 - RNA, 23 nt, artificial
  Oligomer
aacugcugucugucuuaugucca

SEQ ID NO: 23535 - RNA, 23 nt, artificial
  Oligomer
acugcugucugucuuauguccau

SEQ ID NO: 23536 - RNA, 23 nt, artificial
  Oligomer
cugcugucugucuuauguccauu

SEQ ID NO: 23537 - RNA, 23 nt, artificial
  Oligomer
ugcugucugucuuauguccauuu

SEQ ID NO: 23538 - RNA, 23 nt, artificial
  Oligomer
uauguccauuuggacagacuauc

SEQ ID NO: 23539 - RNA, 23 nt, artificial
  Oligomer
auguccauuuggacagacuaucc

SEQ ID NO: 23540 - RNA, 23 nt, artificial
  Oligomer
uguccauuuggacagacuaucca

SEQ ID NO: 23541 - RNA, 23 nt, artificial
  Oligomer
guccauuuggacagacuauccau

SEQ ID NO: 23542 - RNA, 23 nt, artificial
  Oligomer
uuggacagacuauccaucuguug

SEQ ID NO: 23543 - RNA, 23 nt, artificial
  Oligomer
uuugaguauugugaucucuuuug

SEQ ID NO: 23544 - RNA, 23 nt, artificial
  Oligomer
uugaguauugugaucucuuuugg

SEQ ID NO: 23545 - RNA, 23 nt, artificial
  Oligomer
ugaguauugugaucucuuuuggu

SEQ ID NO: 23546 - RNA, 23 nt, artificial
  Oligomer
gaguauugugaucucuuuugguu

SEQ ID NO: 23547 - RNA, 23 nt, artificial
  Oligomer
auggcaggucugcagucucauug

SEQ ID NO: 23548 - RNA, 23 nt, artificial
  Oligomer
uggcaggucugcagucucauuga

SEQ ID NO: 23549 - RNA, 23 nt, artificial
  Oligomer
ggcaggucugcagucucauugaa

SEQ ID NO: 23550 - RNA, 23 nt, artificial
  Oligomer
gcaggucugcagucucauugaaa

SEQ ID NO: 23551 - RNA, 23 nt, artificial
  Oligomer
caggucugcagucucauugaaau

SEQ ID NO: 23552 - RNA, 23 nt, artificial
  Oligomer
caauauuagcaacagcccagaua

SEQ ID NO: 23553 - RNA, 23 nt, artificial
  Oligomer
aauacauaagucccacccagacu

SEQ ID NO: 23554 - RNA, 23 nt, artificial
  Oligomer
acugaggagguaguuguuuaguc

SEQ ID NO: 23555 - RNA, 23 nt, artificial
  Oligomer
cugaggagguaguuguuuaguca

SEQ ID NO: 23556 - RNA, 23 nt, artificial
  Oligomer
ugaggagguaguuguuuagucac

SEQ ID NO: 23557 - RNA, 23 nt, artificial
  Oligomer
gaggagguaguuguuuagucaca

SEQ ID NO: 23558 - RNA, 23 nt, artificial
  Oligomer
aggagguaguuguuuagucacag

SEQ ID NO: 23559 - RNA, 23 nt, artificial
  Oligomer
cuuauuacucaugguaaugucuu

SEQ ID NO: 23560 - RNA, 23 nt, artificial
  Oligomer
uuauuacucaugguaaugucuuu

SEQ ID NO: 23561 - RNA, 23 nt, artificial
  Oligomer
uauuacucaugguaaugucuuuu

SEQ ID NO: 23562 - RNA, 23 nt, artificial
  Oligomer
auuacucaugguaaugucuuuuu

SEQ ID NO: 23563 - RNA, 23 nt, artificial
  Oligomer
uuacucaugguaaugucuuuuug

SEQ ID NO: 23564 - RNA, 23 nt, artificial
  Oligomer
ucgaacuuuuaaaaacacgcugg

SEQ ID NO: 23565 - RNA, 23 nt, artificial
  Oligomer
cgaacuuuuaaaaacacgcuggg

SEQ ID NO: 23566 - RNA, 23 nt, artificial
  Oligomer
uuaaaaacacgcugggcuucauc

SEQ ID NO: 23567 - RNA, 23 nt, artificial
  Oligomer
uggucuguucacucucuucccuc

SEQ ID NO: 23568 - RNA, 23 nt, artificial
  Oligomer
ggucuguucacucucuucccucu

SEQ ID NO: 23569 - RNA, 23 nt, artificial
  Oligomer
ugguuccacauuuauaagaguug

SEQ ID NO: 23570 - RNA, 23 nt, artificial
  Oligomer
gguuccacauuuauaagaguugc

SEQ ID NO: 23571 - RNA, 23 nt, artificial
  Oligomer
guuccacauuuauaagaguugcg

SEQ ID NO: 23572 - RNA, 23 nt, artificial
  Oligomer
uuccacauuuauaagaguugcga

SEQ ID NO: 23573 - RNA, 23 nt, artificial
  Oligomer
uccacauuuauaagaguugcgag

SEQ ID NO: 23574 - RNA, 23 nt, artificial
  Oligomer
ugguucuuagcaaaacacucauc

SEQ ID NO: 23575 - RNA, 23 nt, artificial
  Oligomer
gguucuuagcaaaacacucaucu

SEQ ID NO: 23576 - RNA, 23 nt, artificial
  Oligomer
guucuuagcaaaacacucaucuu

SEQ ID NO: 23577 - RNA, 23 nt, artificial
  Oligomer
acacucaucuucuuagguucugg

SEQ ID NO: 23578 - RNA, 23 nt, artificial
  Oligomer
cacucaucuucuuagguucuggg

SEQ ID NO: 23579 - RNA, 23 nt, artificial
  Oligomer
acucaucuucuuagguucugggu

SEQ ID NO: 23580 - RNA, 23 nt, artificial
  Oligomer
cucaucuucuuagguucugggua

SEQ ID NO: 23581 - RNA, 23 nt, artificial
  Oligomer
ucaucuucuuagguucuggguaa

SEQ ID NO: 23582 - RNA, 23 nt, artificial
  Oligomer
ugauacaagcccuuguccuugau

SEQ ID NO: 23583 - RNA, 23 nt, artificial
  Oligomer
gauacaagcccuuguccuugauc

SEQ ID NO: 23584 - RNA, 23 nt, artificial
  Oligomer
auacaagcccuuguccuugaucu

SEQ ID NO: 23585 - RNA, 23 nt, artificial
  Oligomer
uacuuggaaugaacacugucaaa

SEQ ID NO: 23586 - RNA, 23 nt, artificial
  Oligomer
acuuggaaugaacacugucaaau

SEQ ID NO: 23587 - RNA, 23 nt, artificial
  Oligomer
cuuggaaugaacacugucaaauu

SEQ ID NO: 23588 - RNA, 23 nt, artificial
  Oligomer
uuggaaugaacacugucaaauuu

SEQ ID NO: 23589 - RNA, 23 nt, artificial
  Oligomer
ugaacacugucaaauuucucuuu

SEQ ID NO: 23590 - RNA, 23 nt, artificial
  Oligomer
gaacacugucaaauuucucuuug

SEQ ID NO: 23591 - RNA, 23 nt, artificial
  Oligomer
aacacugucaaauuucucuuugc

SEQ ID NO: 23592 - RNA, 23 nt, artificial
  Oligomer
uccuaauuccguugcagcucuuc

SEQ ID NO: 23593 - RNA, 23 nt, artificial
  Oligomer
ggaguggaaaguccuaagccucc

SEQ ID NO: 23594 - RNA, 23 nt, artificial
  Oligomer
gaguggaaaguccuaagccuccu

SEQ ID NO: 23595 - RNA, 23 nt, artificial
  Oligomer
aguggaaaguccuaagccuccuu

SEQ ID NO: 23596 - RNA, 23 nt, artificial
  Oligomer
guggaaaguccuaagccuccuuc

SEQ ID NO: 23597 - RNA, 23 nt, artificial
  Oligomer
uggaaaguccuaagccuccuucc

SEQ ID NO: 23598 - RNA, 23 nt, artificial
  Oligomer
ggaaaguccuaagccuccuucca

SEQ ID NO: 23599 - RNA, 23 nt, artificial
  Oligomer
gaaaguccuaagccuccuuccau

SEQ ID NO: 23600 - RNA, 23 nt, artificial
  Oligomer
aaaguccuaagccuccuuccauu

SEQ ID NO: 23601 - RNA, 23 nt, artificial
  Oligomer
uuaucaaggugauggcucucccu

SEQ ID NO: 23602 - RNA, 23 nt, artificial
  Oligomer
uaucaaggugauggcucucccuc

SEQ ID NO: 23603 - RNA, 23 nt, artificial
  Oligomer
aucaaggugauggcucucccucc

SEQ ID NO: 23604 - RNA, 23 nt, artificial
  Oligomer
uaaaaggcaguuuuccagaaauu

SEQ ID NO: 23605 - RNA, 23 nt, artificial
  Oligomer
uguaucacuuuugucgcaugaag

SEQ ID NO: 23606 - RNA, 23 nt, artificial
  Oligomer
guaucacuuuugucgcaugaaga

SEQ ID NO: 23607 - RNA, 23 nt, artificial
  Oligomer
uaucacuuuugucgcaugaagau

SEQ ID NO: 23608 - RNA, 23 nt, artificial
  Oligomer
aucacuuuugucgcaugaagaug

SEQ ID NO: 23609 - RNA, 23 nt, artificial
  Oligomer
uguguugguuccacauuuauaag

SEQ ID NO: 23610 - RNA, 23 nt, artificial
  Oligomer
guguugguuccacauuuauaaga

SEQ ID NO: 23611 - RNA, 23 nt, artificial
  Oligomer
uguugguuccacauuuauaagag

SEQ ID NO: 23612 - RNA, 23 nt, artificial
  Oligomer
cgauaguugaauucuugguucuu

SEQ ID NO: 23613 - RNA, 23 nt, artificial
  Oligomer
gauaguugaauucuugguucuua

SEQ ID NO: 23614 - RNA, 23 nt, artificial
  Oligomer
cagguugacugaaguuagcaagc

SEQ ID NO: 23615 - RNA, 23 nt, artificial
  Oligomer
agguugacugaaguuagcaagca

SEQ ID NO: 23616 - RNA, 23 nt, artificial
  Oligomer
gguugacugaaguuagcaagcac

SEQ ID NO: 23617 - RNA, 23 nt, artificial
  Oligomer
guugacugaaguuagcaagcacu

SEQ ID NO: 23618 - RNA, 23 nt, artificial
  Oligomer
uugacugaaguuagcaagcacug

SEQ ID NO: 23619 - RNA, 23 nt, artificial
  Oligomer
uagcaagcacugacaguucagaa

SEQ ID NO: 23620 - RNA, 23 nt, artificial
  Oligomer
caaaacuugugcggcccauauac

SEQ ID NO: 23621 - RNA, 23 nt, artificial
  Oligomer
aaaacuugugcggcccauauacu

SEQ ID NO: 23622 - RNA, 23 nt, artificial
  Oligomer
gaaccaaguuuuccugguccugc

SEQ ID NO: 23623 - RNA, 23 nt, artificial
  Oligomer
cccaucccuuagugaucccaccu

SEQ ID NO: 23624 - RNA, 23 nt, artificial
  Oligomer
ccaucccuuagugaucccaccuu

SEQ ID NO: 23625 - RNA, 23 nt, artificial
  Oligomer
caucccuuagugaucccaccuua

SEQ ID NO: 23626 - RNA, 23 nt, artificial
  Oligomer
aucccuuagugaucccaccuuag

SEQ ID NO: 23627 - RNA, 23 nt, artificial
  Oligomer
ucccuuagugaucccaccuuaga

SEQ ID NO: 23628 - RNA, 23 nt, artificial
  Oligomer
cuguaugcaaguuuccucugguu

SEQ ID NO: 23629 - RNA, 23 nt, artificial
  Oligomer
agcaaaaacaaucauccaacuca

SEQ ID NO: 23630 - RNA, 23 nt, artificial
  Oligomer
gcaaaaacaaucauccaacucaa

SEQ ID NO: 23631 - RNA, 23 nt, artificial
  Oligomer
caaaaacaaucauccaacucaaa

SEQ ID NO: 23632 - RNA, 23 nt, artificial
  Oligomer
aaaaacaaucauccaacucaaau

SEQ ID NO: 23633 - RNA, 23 nt, artificial
  Oligomer
aaaacaaucauccaacucaaauu

SEQ ID NO: 23634 - RNA, 23 nt, artificial
  Oligomer
uccaggaagaugacaucccaaua

SEQ ID NO: 23635 - RNA, 23 nt, artificial
  Oligomer
gcugucugucuuauguccauuug

SEQ ID NO: 23636 - RNA, 23 nt, artificial
  Oligomer
cugucugucuuauguccauuugg

SEQ ID NO: 23637 - RNA, 23 nt, artificial
  Oligomer
ugucugucuuauguccauuugga

SEQ ID NO: 23638 - RNA, 23 nt, artificial
  Oligomer
gucugucuuauguccauuuggac

SEQ ID NO: 23639 - RNA, 23 nt, artificial
  Oligomer
ucugucuuauguccauuuggaca

SEQ ID NO: 23640 - RNA, 23 nt, artificial
  Oligomer
ccuccucaauauuagcaacagcc

SEQ ID NO: 23641 - RNA, 23 nt, artificial
  Oligomer
gaaauuaagagaagaaucugauc

SEQ ID NO: 23642 - RNA, 23 nt, artificial
  Oligomer
gcccauaagugugcucugaagug

SEQ ID NO: 23643 - RNA, 23 nt, artificial
  Oligomer
cccauaagugugcucugaaguga

SEQ ID NO: 23644 - RNA, 23 nt, artificial
  Oligomer
ccauaagugugcucugaagugaa

SEQ ID NO: 23645 - RNA, 23 nt, artificial
  Oligomer
cauaagugugcucugaagugaaa

SEQ ID NO: 23646 - RNA, 23 nt, artificial
  Oligomer
auaagugugcucugaagugaaaa

SEQ ID NO: 23647 - RNA, 23 nt, artificial
  Oligomer
auuaaagucuccucuuggcauac

SEQ ID NO: 23648 - RNA, 23 nt, artificial
  Oligomer
uuaaagucuccucuuggcauacg

SEQ ID NO: 23649 - RNA, 23 nt, artificial
  Oligomer
uacucaugguaaugucuuuuugc

SEQ ID NO: 23650 - RNA, 23 nt, artificial
  Oligomer
acucaugguaaugucuuuuugcc

SEQ ID NO: 23651 - RNA, 23 nt, artificial
  Oligomer
cucaugguaaugucuuuuugccu

SEQ ID NO: 23652 - RNA, 23 nt, artificial
  Oligomer
ucaugguaaugucuuuuugccuu

SEQ ID NO: 23653 - RNA, 23 nt, artificial
  Oligomer
agaaaucaaaaagguugcccagg

SEQ ID NO: 23654 - RNA, 23 nt, artificial
  Oligomer
gaaaucaaaaagguugcccagga

SEQ ID NO: 23655 - RNA, 23 nt, artificial
  Oligomer
aaaucaaaaagguugcccaggaa

SEQ ID NO: 23656 - RNA, 23 nt, artificial
  Oligomer
aaucaaaaagguugcccaggaac

SEQ ID NO: 23657 - RNA, 23 nt, artificial
  Oligomer
aucaaaaagguugcccaggaacu

SEQ ID NO: 23658 - RNA, 23 nt, artificial
  Oligomer
aagguugcccaggaacuuacaaa

SEQ ID NO: 23659 - RNA, 23 nt, artificial
  Oligomer
agguugcccaggaacuuacaaag

SEQ ID NO: 23660 - RNA, 23 nt, artificial
  Oligomer
gguugcccaggaacuuacaaagg

SEQ ID NO: 23661 - RNA, 23 nt, artificial
  Oligomer
guugcccaggaacuuacaaagga

SEQ ID NO: 23662 - RNA, 23 nt, artificial
  Oligomer
uugcccaggaacuuacaaaggaa

SEQ ID NO: 23663 - RNA, 23 nt, artificial
  Oligomer
ugaauacuuguaugggcuuuacu

SEQ ID NO: 23664 - RNA, 23 nt, artificial
  Oligomer
agcaaaacacucaucuucuuagg

SEQ ID NO: 23665 - RNA, 23 nt, artificial
  Oligomer
gcaaaacacucaucuucuuaggu

SEQ ID NO: 23666 - RNA, 23 nt, artificial
  Oligomer
caaaacacucaucuucuuagguu

SEQ ID NO: 23667 - RNA, 23 nt, artificial
  Oligomer
aaaacacucaucuucuuagguuc

SEQ ID NO: 23668 - RNA, 23 nt, artificial
  Oligomer
uccugugggcuuuuugugaugga

SEQ ID NO: 23669 - RNA, 23 nt, artificial
  Oligomer
ccugugggcuuuuugugauggau

SEQ ID NO: 23670 - RNA, 23 nt, artificial
  Oligomer
cugugggcuuuuugugauggaug

SEQ ID NO: 23671 - RNA, 23 nt, artificial
  Oligomer
ugugggcuuuuugugauggauga

SEQ ID NO: 23672 - RNA, 23 nt, artificial
  Oligomer
acacugucaaauuucucuuugcc

SEQ ID NO: 23673 - RNA, 23 nt, artificial
  Oligomer
cacugucaaauuucucuuugccu

SEQ ID NO: 23674 - RNA, 23 nt, artificial
  Oligomer
cauuucucccaguauaucugucu

SEQ ID NO: 23675 - RNA, 23 nt, artificial
  Oligomer
auuucucccaguauaucugucuc

SEQ ID NO: 23676 - RNA, 23 nt, artificial
  Oligomer
uuucucccaguauaucugucucu

SEQ ID NO: 23677 - RNA, 23 nt, artificial
  Oligomer
uucucccaguauaucugucucug

SEQ ID NO: 23678 - RNA, 23 nt, artificial
  Oligomer
ucucccaguauaucugucucugu

SEQ ID NO: 23679 - RNA, 23 nt, artificial
  Oligomer
aaguccuaagccuccuuccauuc

SEQ ID NO: 23680 - RNA, 23 nt, artificial
  Oligomer
ugacaucccaauaacuuggguau

SEQ ID NO: 23681 - RNA, 23 nt, artificial
  Oligomer
ucuaucucugccucuccuaauuu

SEQ ID NO: 23682 - RNA, 23 nt, artificial
  Oligomer
cuaucucugccucuccuaauuuc

SEQ ID NO: 23683 - RNA, 23 nt, artificial
  Oligomer
uucugggcagauaaaaggcaguu

SEQ ID NO: 23684 - RNA, 23 nt, artificial
  Oligomer
gcaguuuuccagaaauugagagg

SEQ ID NO: 23685 - RNA, 23 nt, artificial
  Oligomer
caguuuuccagaaauugagaggu

SEQ ID NO: 23686 - RNA, 23 nt, artificial
  Oligomer
aguuuuccagaaauugagagguc

SEQ ID NO: 23687 - RNA, 23 nt, artificial
  Oligomer
guuuuccagaaauugagaggucu

SEQ ID NO: 23688 - RNA, 23 nt, artificial
  Oligomer
uuuuccagaaauugagaggucua

SEQ ID NO: 23689 - RNA, 23 nt, artificial
  Oligomer
ugcccaggaacuuacaaaggaaa

SEQ ID NO: 23690 - RNA, 23 nt, artificial
  Oligomer
uucgaacuuuuaaaaacacgcug

SEQ ID NO: 23691 - RNA, 23 nt, artificial
  Oligomer
aaggugaagauaaaagccgcguc

SEQ ID NO: 23692 - RNA, 23 nt, artificial
  Oligomer
aggugaagauaaaagccgcgucu

SEQ ID NO: 23693 - RNA, 23 nt, artificial
  Oligomer
ggugaagauaaaagccgcgucuu

SEQ ID NO: 23694 - RNA, 23 nt, artificial
  Oligomer
gugaagauaaaagccgcgucuug

SEQ ID NO: 23695 - RNA, 23 nt, artificial
  Oligomer
ugaagauaaaagccgcgucuugu

SEQ ID NO: 23696 - RNA, 23 nt, artificial
  Oligomer
uaaaagccgcgucuugucaguuu

SEQ ID NO: 23697 - RNA, 23 nt, artificial
  Oligomer
ucugugacauuaucuugagauuu

SEQ ID NO: 23698 - RNA, 23 nt, artificial
  Oligomer
cugugacauuaucuugagauuuc

SEQ ID NO: 23699 - RNA, 23 nt, artificial
  Oligomer
ugugacauuaucuugagauuucu

SEQ ID NO: 23700 - RNA, 23 nt, artificial
  Oligomer
agguucuggguaaccguguauag

SEQ ID NO: 23701 - RNA, 23 nt, artificial
  Oligomer
gguucuggguaaccguguauaga

SEQ ID NO: 23702 - RNA, 23 nt, artificial
  Oligomer
guucuggguaaccguguauagau

SEQ ID NO: 23703 - RNA, 23 nt, artificial
  Oligomer
uucuggguaaccguguauagaug

SEQ ID NO: 23704 - RNA, 23 nt, artificial
  Oligomer
uaucugucucuguaugcaaguuu

SEQ ID NO: 23705 - RNA, 23 nt, artificial
  Oligomer
aucugucucuguaugcaaguuuc

SEQ ID NO: 23706 - RNA, 23 nt, artificial
  Oligomer
ucugugucuuggucuuccuaauu

SEQ ID NO: 23707 - RNA, 23 nt, artificial
  Oligomer
cugugucuuggucuuccuaauuc

SEQ ID NO: 23708 - RNA, 23 nt, artificial
  Oligomer
ucuguugcuuguuucaagacuug

SEQ ID NO: 23709 - RNA, 23 nt, artificial
  Oligomer
cuguugcuuguuucaagacuugu

SEQ ID NO: 23710 - RNA, 23 nt, artificial
  Oligomer
uguugcuuguuucaagacuuguu

SEQ ID NO: 23711 - RNA, 23 nt, artificial
  Oligomer
guugcuuguuucaagacuuguug

SEQ ID NO: 23712 - RNA, 23 nt, artificial
  Oligomer
uugcuuguuucaagacuuguuga

SEQ ID NO: 23713 - RNA, 23 nt, artificial
  Oligomer
gcuauuccacuuagagggagucc

SEQ ID NO: 23714 - RNA, 23 nt, artificial
  Oligomer
cuauuccacuuagagggaguccu

SEQ ID NO: 23715 - RNA, 23 nt, artificial
  Oligomer
uauuccacuuagagggaguccug

SEQ ID NO: 23716 - RNA, 23 nt, artificial
  Oligomer
auuccacuuagagggaguccugg

SEQ ID NO: 23717 - RNA, 23 nt, artificial
  Oligomer
uuccacuuagagggaguccugga

SEQ ID NO: 23718 - RNA, 23 nt, artificial
  Oligomer
aaaaaugaauacuuguaugggcu

SEQ ID NO: 23719 - RNA, 23 nt, artificial
  Oligomer
aaaaugaauacuuguaugggcuu

SEQ ID NO: 23720 - RNA, 23 nt, artificial
  Oligomer
aaaugaauacuuguaugggcuuu

SEQ ID NO: 23721 - RNA, 23 nt, artificial
  Oligomer
aaugaauacuuguaugggcuuua

SEQ ID NO: 23722 - RNA, 23 nt, artificial
  Oligomer
augaauacuuguaugggcuuuac

SEQ ID NO: 23723 - RNA, 23 nt, artificial
  Oligomer
gucuucgaacuuuuaaaaacacg

SEQ ID NO: 23724 - RNA, 23 nt, artificial
  Oligomer
ucuucgaacuuuuaaaaacacgc

SEQ ID NO: 23725 - RNA, 23 nt, artificial
  Oligomer
cuucgaacuuuuaaaaacacgcu

SEQ ID NO: 23726 - RNA, 23 nt, artificial
  Oligomer
guugguuccacauuuauaagagu

SEQ ID NO: 23727 - RNA, 23 nt, artificial
  Oligomer
uugguuccacauuuauaagaguu

SEQ ID NO: 23728 - RNA, 23 nt, artificial
  Oligomer
cuguuggaaguacagcuguaauc

SEQ ID NO: 23729 - RNA, 23 nt, artificial
  Oligomer
uguuggaaguacagcuguaaucc

SEQ ID NO: 23730 - RNA, 23 nt, artificial
  Oligomer
guuggaaguacagcuguaaucca

SEQ ID NO: 23731 - RNA, 23 nt, artificial
  Oligomer
uuggaaguacagcuguaauccaa

SEQ ID NO: 23732 - RNA, 23 nt, artificial
  Oligomer
uggaaguacagcuguaauccaag

SEQ ID NO: 23733 - RNA, 23 nt, artificial
  Oligomer
cgucuugucaguuuccagaauac

SEQ ID NO: 23734 - RNA, 23 nt, artificial
  Oligomer
gucuugucaguuuccagaauaca

SEQ ID NO: 23735 - RNA, 23 nt, artificial
  Oligomer
ucuugucaguuuccagaauacag

SEQ ID NO: 23736 - RNA, 23 nt, artificial
  Oligomer
cuugucaguuuccagaauacaga

SEQ ID NO: 23737 - RNA, 23 nt, artificial
  Oligomer
uugucaguuuccagaauacagaa

SEQ ID NO: 23738 - RNA, 23 nt, artificial
  Oligomer
ugacugaaguuagcaagcacuga

SEQ ID NO: 23739 - RNA, 23 nt, artificial
  Oligomer
gacugaaguuagcaagcacugac

SEQ ID NO: 23740 - RNA, 23 nt, artificial
  Oligomer
acugaaguuagcaagcacugaca

SEQ ID NO: 23741 - RNA, 23 nt, artificial
  Oligomer
uuuugugauggaugauacauuga

SEQ ID NO: 23742 - RNA, 23 nt, artificial
  Oligomer
uuugugauggaugauacauugau

SEQ ID NO: 23743 - RNA, 23 nt, artificial
  Oligomer
gauacauugauacaagcccuugu

SEQ ID NO: 23744 - RNA, 23 nt, artificial
  Oligomer
auacauugauacaagcccuuguc

SEQ ID NO: 23745 - RNA, 23 nt, artificial
  Oligomer
aaguauaccucauucagaaccaa

SEQ ID NO: 23746 - RNA, 23 nt, artificial
  Oligomer
agucauuucucccaguauaucug

SEQ ID NO: 23747 - RNA, 23 nt, artificial
  Oligomer
gucauuucucccaguauaucugu

SEQ ID NO: 23748 - RNA, 23 nt, artificial
  Oligomer
ucauuucucccaguauaucuguc

SEQ ID NO: 23749 - RNA, 23 nt, artificial
  Oligomer
aguccuaagccuccuuccauuca

SEQ ID NO: 23750 - RNA, 23 nt, artificial
  Oligomer
guccuaagccuccuuccauucau

SEQ ID NO: 23751 - RNA, 23 nt, artificial
  Oligomer
uccuaagccuccuuccauucauc

SEQ ID NO: 23752 - RNA, 23 nt, artificial
  Oligomer
ucccaauaacuuggguaucacca

SEQ ID NO: 23753 - RNA, 23 nt, artificial
  Oligomer
cccaauaacuuggguaucaccaa

SEQ ID NO: 23754 - RNA, 23 nt, artificial
  Oligomer
ccaauaacuuggguaucaccaaa

SEQ ID NO: 23755 - RNA, 23 nt, artificial
  Oligomer
caauaacuuggguaucaccaaaa

SEQ ID NO: 23756 - RNA, 23 nt, artificial
  Oligomer
aauaacuuggguaucaccaaaac

SEQ ID NO: 23757 - RNA, 23 nt, artificial
  Oligomer
ccagguucuaucucugccucucc

SEQ ID NO: 23758 - RNA, 23 nt, artificial
  Oligomer
agggaugagaacuccuuagcagg

SEQ ID NO: 23759 - RNA, 23 nt, artificial
  Oligomer
gggaugagaacuccuuagcaggg

SEQ ID NO: 23760 - RNA, 23 nt, artificial
  Oligomer
ggaugagaacuccuuagcagggg

SEQ ID NO: 23761 - RNA, 23 nt, artificial
  Oligomer
gaugagaacuccuuagcaggggu

SEQ ID NO: 23762 - RNA, 23 nt, artificial
  Oligomer
augagaacuccuuagcaggggua

SEQ ID NO: 23763 - RNA, 23 nt, artificial
  Oligomer
uacaguacauagaucucuauguu

SEQ ID NO: 23764 - RNA, 23 nt, artificial
  Oligomer
uuccauagaauuagacagaaaac

SEQ ID NO: 23765 - RNA, 23 nt, artificial
  Oligomer
uagaugagcaggucaaauuuaug

SEQ ID NO: 23766 - RNA, 23 nt, artificial
  Oligomer
agaugagcaggucaaauuuaugu

SEQ ID NO: 23767 - RNA, 23 nt, artificial
  Oligomer
gaugagcaggucaaauuuaugua

SEQ ID NO: 23768 - RNA, 23 nt, artificial
  Oligomer
augagcaggucaaauuuauguac

SEQ ID NO: 23769 - RNA, 23 nt, artificial
  Oligomer
ugagcaggucaaauuuauguaca

SEQ ID NO: 23770 - RNA, 23 nt, artificial
  Oligomer
uuacauggacaagcuugucuagc

SEQ ID NO: 23771 - RNA, 23 nt, artificial
  Oligomer
uacauggacaagcuugucuagca

SEQ ID NO: 23772 - RNA, 23 nt, artificial
  Oligomer
aaagucauuucucccaguauauc

SEQ ID NO: 23773 - RNA, 23 nt, artificial
  Oligomer
aagucauuucucccaguauaucu

SEQ ID NO: 23774 - RNA, 23 nt, artificial
  Oligomer
auaucugucucuguaugcaaguu

SEQ ID NO: 23775 - RNA, 23 nt, artificial
  Oligomer
cugucuuauguccauuuggacag

SEQ ID NO: 23776 - RNA, 23 nt, artificial
  Oligomer
ugucuuauguccauuuggacaga

SEQ ID NO: 23777 - RNA, 23 nt, artificial
  Oligomer
gucuuauguccauuuggacagac

SEQ ID NO: 23778 - RNA, 23 nt, artificial
  Oligomer
ucuuauguccauuuggacagacu

SEQ ID NO: 23779 - RNA, 23 nt, artificial
  Oligomer
uucucuagagcauaguaaucaca

SEQ ID NO: 23780 - RNA, 23 nt, artificial
  Oligomer
agucacagguacacacaaaauuc

SEQ ID NO: 23781 - RNA, 23 nt, artificial
  Oligomer
gucacagguacacacaaaauuca

SEQ ID NO: 23782 - RNA, 23 nt, artificial
  Oligomer
ucacagguacacacaaaauucag

SEQ ID NO: 23783 - RNA, 23 nt, artificial
  Oligomer
cacagguacacacaaaauucagu

SEQ ID NO: 23784 - RNA, 23 nt, artificial
  Oligomer
acagguacacacaaaauucagug

SEQ ID NO: 23785 - RNA, 23 nt, artificial
  Oligomer
gccuucuggaagaaaucaaaaag

SEQ ID NO: 23786 - RNA, 23 nt, artificial
  Oligomer
ccuucuggaagaaaucaaaaagg

SEQ ID NO: 23787 - RNA, 23 nt, artificial
  Oligomer
cuucuggaagaaaucaaaaaggu

SEQ ID NO: 23788 - RNA, 23 nt, artificial
  Oligomer
uucuggaagaaaucaaaaagguu

SEQ ID NO: 23789 - RNA, 23 nt, artificial
  Oligomer
ucuggaagaaaucaaaaagguug

SEQ ID NO: 23790 - RNA, 23 nt, artificial
  Oligomer
cacaaagagaauguuacucaguc

SEQ ID NO: 23791 - RNA, 23 nt, artificial
  Oligomer
acaaagagaauguuacucagucc

SEQ ID NO: 23792 - RNA, 23 nt, artificial
  Oligomer
caaagagaauguuacucaguccc

SEQ ID NO: 23793 - RNA, 23 nt, artificial
  Oligomer
aaagagaauguuacucaguccca

SEQ ID NO: 23794 - RNA, 23 nt, artificial
  Oligomer
aagagaauguuacucagucccau

SEQ ID NO: 23795 - RNA, 23 nt, artificial
  Oligomer
cauguaucacuuuugucgcauga

SEQ ID NO: 23796 - RNA, 23 nt, artificial
  Oligomer
auguaucacuuuugucgcaugaa

SEQ ID NO: 23797 - RNA, 23 nt, artificial
  Oligomer
gucgcaugaagaugucuucgaac

SEQ ID NO: 23798 - RNA, 23 nt, artificial
  Oligomer
ucgcaugaagaugucuucgaacu

SEQ ID NO: 23799 - RNA, 23 nt, artificial
  Oligomer
uaaaaacacgcugggcuucauca

SEQ ID NO: 23800 - RNA, 23 nt, artificial
  Oligomer
aaaaacacgcugggcuucaucag

SEQ ID NO: 23801 - RNA, 23 nt, artificial
  Oligomer
aaaacacgcugggcuucaucaga

SEQ ID NO: 23802 - RNA, 23 nt, artificial
  Oligomer
aaacacgcugggcuucaucagau

SEQ ID NO: 23803 - RNA, 23 nt, artificial
  Oligomer
acucucuucccucuccauugugu

SEQ ID NO: 23804 - RNA, 23 nt, artificial
  Oligomer
cucucuucccucuccauuguguu

SEQ ID NO: 23805 - RNA, 23 nt, artificial
  Oligomer
ugucaguuuccagaauacagaag

SEQ ID NO: 23806 - RNA, 23 nt, artificial
  Oligomer
gucaguuuccagaauacagaaga

SEQ ID NO: 23807 - RNA, 23 nt, artificial
  Oligomer
ucaguuuccagaauacagaagau

SEQ ID NO: 23808 - RNA, 23 nt, artificial
  Oligomer
uguauagaugagcaggucaaauu

SEQ ID NO: 23809 - RNA, 23 nt, artificial
  Oligomer
guauagaugagcaggucaaauuu

SEQ ID NO: 23810 - RNA, 23 nt, artificial
  Oligomer
uauagaugagcaggucaaauuua

SEQ ID NO: 23811 - RNA, 23 nt, artificial
  Oligomer
auagaugagcaggucaaauuuau

SEQ ID NO: 23812 - RNA, 23 nt, artificial
  Oligomer
cuauuucagguugacugaaguua

SEQ ID NO: 23813 - RNA, 23 nt, artificial
  Oligomer
uauuucagguugacugaaguuag

SEQ ID NO: 23814 - RNA, 23 nt, artificial
  Oligomer
auuucagguugacugaaguuagc

SEQ ID NO: 23815 - RNA, 23 nt, artificial
  Oligomer
uuucagguugacugaaguuagca

SEQ ID NO: 23816 - RNA, 23 nt, artificial
  Oligomer
uucagguugacugaaguuagcaa

SEQ ID NO: 23817 - RNA, 23 nt, artificial
  Oligomer
agaguuugcaaauuggcauggca

SEQ ID NO: 23818 - RNA, 23 nt, artificial
  Oligomer
aggguucacaagcucuggcauuu

SEQ ID NO: 23819 - RNA, 23 nt, artificial
  Oligomer
ggguucacaagcucuggcauuuu

SEQ ID NO: 23820 - RNA, 23 nt, artificial
  Oligomer
gguucacaagcucuggcauuuuc

SEQ ID NO: 23821 - RNA, 23 nt, artificial
  Oligomer
caagcucuggcauuuuccuguuu

SEQ ID NO: 23822 - RNA, 23 nt, artificial
  Oligomer
aagcucuggcauuuuccuguuua

SEQ ID NO: 23823 - RNA, 23 nt, artificial
  Oligomer
acccugacagagggaugagaacu

SEQ ID NO: 23824 - RNA, 23 nt, artificial
  Oligomer
cccugacagagggaugagaacuc

SEQ ID NO: 23825 - RNA, 23 nt, artificial
  Oligomer
ccugacagagggaugagaacucc

SEQ ID NO: 23826 - RNA, 23 nt, artificial
  Oligomer
cugacagagggaugagaacuccu

SEQ ID NO: 23827 - RNA, 23 nt, artificial
  Oligomer
ugacagagggaugagaacuccuu

SEQ ID NO: 23828 - RNA, 23 nt, artificial
  Oligomer
caugguaaugucuuuuugccuuc

SEQ ID NO: 23829 - RNA, 23 nt, artificial
  Oligomer
augguaaugucuuuuugccuucu

SEQ ID NO: 23830 - RNA, 23 nt, artificial
  Oligomer
aaaaaaugaauacuuguaugggc

SEQ ID NO: 23831 - RNA, 23 nt, artificial
  Oligomer
uagacagaaaaccaucacacaua

SEQ ID NO: 23832 - RNA, 23 nt, artificial
  Oligomer
cagaauacagaagauggucauau

SEQ ID NO: 23833 - RNA, 23 nt, artificial
  Oligomer
agaauacagaagauggucauauu

SEQ ID NO: 23834 - RNA, 23 nt, artificial
  Oligomer
gaauacagaagauggucauauug

SEQ ID NO: 23835 - RNA, 23 nt, artificial
  Oligomer
aauacagaagauggucauauugc

SEQ ID NO: 23836 - RNA, 23 nt, artificial
  Oligomer
auacagaagauggucauauugcu

SEQ ID NO: 23837 - RNA, 23 nt, artificial
  Oligomer
aucauacucgauaguugaauucu

SEQ ID NO: 23838 - RNA, 23 nt, artificial
  Oligomer
ucauacucgauaguugaauucuu

SEQ ID NO: 23839 - RNA, 23 nt, artificial
  Oligomer
cauacucgauaguugaauucuug

SEQ ID NO: 23840 - RNA, 23 nt, artificial
  Oligomer
agaaauugguacuauuucagguu

SEQ ID NO: 23841 - RNA, 23 nt, artificial
  Oligomer
gcccuuguccuugaucugaagau

SEQ ID NO: 23842 - RNA, 23 nt, artificial
  Oligomer
cccuuguccuugaucugaagauu

SEQ ID NO: 23843 - RNA, 23 nt, artificial
  Oligomer
ccuuguccuugaucugaagauug

SEQ ID NO: 23844 - RNA, 23 nt, artificial
  Oligomer
cuuguccuugaucugaagauugu

SEQ ID NO: 23845 - RNA, 23 nt, artificial
  Oligomer
uuguccuugaucugaagauugug

SEQ ID NO: 23846 - RNA, 23 nt, artificial
  Oligomer
acauggacaagcuugucuagcau

SEQ ID NO: 23847 - RNA, 23 nt, artificial
  Oligomer
cauggacaagcuugucuagcaug

SEQ ID NO: 23848 - RNA, 23 nt, artificial
  Oligomer
auggacaagcuugucuagcaugg

SEQ ID NO: 23849 - RNA, 23 nt, artificial
  Oligomer
ccuaagccuccuuccauucaucc

SEQ ID NO: 23850 - RNA, 23 nt, artificial
  Oligomer
cuaagccuccuuccauucauccc

SEQ ID NO: 23851 - RNA, 23 nt, artificial
  Oligomer
uaagccuccuuccauucauccca

SEQ ID NO: 23852 - RNA, 23 nt, artificial
  Oligomer
aagccuccuuccauucaucccau

SEQ ID NO: 23853 - RNA, 23 nt, artificial
  Oligomer
agccuccuuccauucaucccauu

SEQ ID NO: 23854 - RNA, 23 nt, artificial
  Oligomer
ugugaucucuuuugguucuuuca

SEQ ID NO: 23855 - RNA, 23 nt, artificial
  Oligomer
guucucuccacuauggcuuguug

SEQ ID NO: 23856 - RNA, 23 nt, artificial
  Oligomer
uucucuccacuauggcuuguugg

SEQ ID NO: 23857 - RNA, 23 nt, artificial
  Oligomer
ucucuccacuauggcuuguuggg

SEQ ID NO: 23858 - RNA, 23 nt, artificial
  Oligomer
cucuccacuauggcuuguugggu

SEQ ID NO: 23859 - RNA, 23 nt, artificial
  Oligomer
ucuccacuauggcuuguugggug

SEQ ID NO: 23860 - RNA, 23 nt, artificial
  Oligomer
ucugcucauuguugccuguaccc

SEQ ID NO: 23861 - RNA, 23 nt, artificial
  Oligomer
agacuuuucucuagagcauagua

SEQ ID NO: 23862 - RNA, 23 nt, artificial
  Oligomer
ugguaaugucuuuuugccuucug

SEQ ID NO: 23863 - RNA, 23 nt, artificial
  Oligomer
gaacuuacaaaggaaaggguaga

SEQ ID NO: 23864 - RNA, 23 nt, artificial
  Oligomer
aacuuacaaaggaaaggguagaa

SEQ ID NO: 23865 - RNA, 23 nt, artificial
  Oligomer
acuuacaaaggaaaggguagaaa

SEQ ID NO: 23866 - RNA, 23 nt, artificial
  Oligomer
cuuacaaaggaaaggguagaaaa

SEQ ID NO: 23867 - RNA, 23 nt, artificial
  Oligomer
uuacaaaggaaaggguagaaaaa

SEQ ID NO: 23868 - RNA, 23 nt, artificial
  Oligomer
gucuguucacucucuucccucuc

SEQ ID NO: 23869 - RNA, 23 nt, artificial
  Oligomer
cacucucuucccucuccauugug

SEQ ID NO: 23870 - RNA, 23 nt, artificial
  Oligomer
auaauaacuguuggaaguacagc

SEQ ID NO: 23871 - RNA, 23 nt, artificial
  Oligomer
uaauaacuguuggaaguacagcu

SEQ ID NO: 23872 - RNA, 23 nt, artificial
  Oligomer
aauaacuguuggaaguacagcug

SEQ ID NO: 23873 - RNA, 23 nt, artificial
  Oligomer
auaacuguuggaaguacagcugu

SEQ ID NO: 23874 - RNA, 23 nt, artificial
  Oligomer
uaacuguuggaaguacagcugua

SEQ ID NO: 23875 - RNA, 23 nt, artificial
  Oligomer
guaauccaaggaauguggucugg

SEQ ID NO: 23876 - RNA, 23 nt, artificial
  Oligomer
uaauccaaggaauguggucuggg

SEQ ID NO: 23877 - RNA, 23 nt, artificial
  Oligomer
aauccaaggaauguggucugggg

SEQ ID NO: 23878 - RNA, 23 nt, artificial
  Oligomer
ucuauagagaaaggugaagauaa

SEQ ID NO: 23879 - RNA, 23 nt, artificial
  Oligomer
cuauagagaaaggugaagauaaa

SEQ ID NO: 23880 - RNA, 23 nt, artificial
  Oligomer
uauagagaaaggugaagauaaaa

SEQ ID NO: 23881 - RNA, 23 nt, artificial
  Oligomer
auagagaaaggugaagauaaaag

SEQ ID NO: 23882 - RNA, 23 nt, artificial
  Oligomer
uagagaaaggugaagauaaaagc

SEQ ID NO: 23883 - RNA, 23 nt, artificial
  Oligomer
caucauacucgauaguugaauuc

SEQ ID NO: 23884 - RNA, 23 nt, artificial
  Oligomer
gaauucuugguucuuagcaaaac

SEQ ID NO: 23885 - RNA, 23 nt, artificial
  Oligomer
aauucuugguucuuagcaaaaca

SEQ ID NO: 23886 - RNA, 23 nt, artificial
  Oligomer
uuagaaauugguacuauuucagg

SEQ ID NO: 23887 - RNA, 23 nt, artificial
  Oligomer
uagaaauugguacuauuucaggu

SEQ ID NO: 23888 - RNA, 23 nt, artificial
  Oligomer
aaacauguuagaaacuagccagg

SEQ ID NO: 23889 - RNA, 23 nt, artificial
  Oligomer
aacauguuagaaacuagccaggu

SEQ ID NO: 23890 - RNA, 23 nt, artificial
  Oligomer
acauguuagaaacuagccaggug

SEQ ID NO: 23891 - RNA, 23 nt, artificial
  Oligomer
caacucaaauuugcuagcccuau

SEQ ID NO: 23892 - RNA, 23 nt, artificial
  Oligomer
aacucaaauuugcuagcccuaug

SEQ ID NO: 23893 - RNA, 23 nt, artificial
  Oligomer
ugcuuguuucaagacuuguugau

SEQ ID NO: 23894 - RNA, 23 nt, artificial
  Oligomer
gcuuguuucaagacuuguugaug

SEQ ID NO: 23895 - RNA, 23 nt, artificial
  Oligomer
cugccucuccuaauuuccccaaa

SEQ ID NO: 23896 - RNA, 23 nt, artificial
  Oligomer
uuguugccuguacccuaggccac

SEQ ID NO: 23897 - RNA, 23 nt, artificial
  Oligomer
ccuguacccuaggccaccguuuu

SEQ ID NO: 23898 - RNA, 23 nt, artificial
  Oligomer
cuguacccuaggccaccguuuuc

SEQ ID NO: 23899 - RNA, 23 nt, artificial
  Oligomer
uguacccuaggccaccguuuucc

SEQ ID NO: 23900 - RNA, 23 nt, artificial
  Oligomer
guacccuaggccaccguuuuccu

SEQ ID NO: 23901 - RNA, 23 nt, artificial
  Oligomer
uacccuaggccaccguuuuccuu

SEQ ID NO: 23902 - RNA, 23 nt, artificial
  Oligomer
uaguaaucacacuauuacaguac

SEQ ID NO: 23903 - RNA, 23 nt, artificial
  Oligomer
aguaaucacacuauuacaguaca

SEQ ID NO: 23904 - RNA, 23 nt, artificial
  Oligomer
guaaucacacuauuacaguacau

SEQ ID NO: 23905 - RNA, 23 nt, artificial
  Oligomer
uaaucacacuauuacaguacaua

SEQ ID NO: 23906 - RNA, 23 nt, artificial
  Oligomer
aaucacacuauuacaguacauag

SEQ ID NO: 23907 - RNA, 23 nt, artificial
  Oligomer
cacuauuacaguacauagaucuc

SEQ ID NO: 23908 - RNA, 23 nt, artificial
  Oligomer
gcucugaagugaaaagaagcagu

SEQ ID NO: 23909 - RNA, 23 nt, artificial
  Oligomer
cucugaagugaaaagaagcagua

SEQ ID NO: 23910 - RNA, 23 nt, artificial
  Oligomer
cugaagugaaaagaagcaguaag

SEQ ID NO: 23911 - RNA, 23 nt, artificial
  Oligomer
ugaagugaaaagaagcaguaaga

SEQ ID NO: 23912 - RNA, 23 nt, artificial
  Oligomer
caguaagagaauuaaagucuccu

SEQ ID NO: 23913 - RNA, 23 nt, artificial
  Oligomer
aguaagagaauuaaagucuccuc

SEQ ID NO: 23914 - RNA, 23 nt, artificial
  Oligomer
guaagagaauuaaagucuccucu

SEQ ID NO: 23915 - RNA, 23 nt, artificial
  Oligomer
uaagagaauuaaagucuccucuu

SEQ ID NO: 23916 - RNA, 23 nt, artificial
  Oligomer
aagagaauuaaagucuccucuug

SEQ ID NO: 23917 - RNA, 23 nt, artificial
  Oligomer
uaaagucuccucuuggcauacgg

SEQ ID NO: 23918 - RNA, 23 nt, artificial
  Oligomer
ggaguuacagggaggcuauucca

SEQ ID NO: 23919 - RNA, 23 nt, artificial
  Oligomer
ugggcuucaucagaucuuucagg

SEQ ID NO: 23920 - RNA, 23 nt, artificial
  Oligomer
agacagaaaaccaucacacauau

SEQ ID NO: 23921 - RNA, 23 nt, artificial
  Oligomer
gaaguacagcuguaauccaagga

SEQ ID NO: 23922 - RNA, 23 nt, artificial
  Oligomer
aaguacagcuguaauccaaggaa

SEQ ID NO: 23923 - RNA, 23 nt, artificial
  Oligomer
aguacagcuguaauccaaggaau

SEQ ID NO: 23924 - RNA, 23 nt, artificial
  Oligomer
guacagcuguaauccaaggaaug

SEQ ID NO: 23925 - RNA, 23 nt, artificial
  Oligomer
uacagcuguaauccaaggaaugu

SEQ ID NO: 23926 - RNA, 23 nt, artificial
  Oligomer
ucagguugacugaaguuagcaag

SEQ ID NO: 23927 - RNA, 23 nt, artificial
  Oligomer
agaauucaucugguggaugcgaa

SEQ ID NO: 23928 - RNA, 23 nt, artificial
  Oligomer
gaauucaucugguggaugcgaau

SEQ ID NO: 23929 - RNA, 23 nt, artificial
  Oligomer
aauucaucugguggaugcgaauc

SEQ ID NO: 23930 - RNA, 23 nt, artificial
  Oligomer
auucaucugguggaugcgaauca

SEQ ID NO: 23931 - RNA, 23 nt, artificial
  Oligomer
uucaucugguggaugcgaaucau

SEQ ID NO: 23932 - RNA, 23 nt, artificial
  Oligomer
uugugauggaugauacauugaua

SEQ ID NO: 23933 - RNA, 23 nt, artificial
  Oligomer
ugugauggaugauacauugauac

SEQ ID NO: 23934 - RNA, 23 nt, artificial
  Oligomer
guccuugaucugaagauugugaa

SEQ ID NO: 23935 - RNA, 23 nt, artificial
  Oligomer
uccuugaucugaagauugugaag

SEQ ID NO: 23936 - RNA, 23 nt, artificial
  Oligomer
ccuugaucugaagauugugaagu

SEQ ID NO: 23937 - RNA, 23 nt, artificial
  Oligomer
cuugaucugaagauugugaaguc

SEQ ID NO: 23938 - RNA, 23 nt, artificial
  Oligomer
uugaucugaagauugugaagucu

SEQ ID NO: 23939 - RNA, 23 nt, artificial
  Oligomer
accucauucagaaccaaguuuuc

SEQ ID NO: 23940 - RNA, 23 nt, artificial
  Oligomer
gggguagacuuuucucuagagca

SEQ ID NO: 23941 - RNA, 23 nt, artificial
  Oligomer
ggguagacuuuucucuagagcau

SEQ ID NO: 23942 - RNA, 23 nt, artificial
  Oligomer
gguagacuuuucucuagagcaua

SEQ ID NO: 23943 - RNA, 23 nt, artificial
  Oligomer
guagacuuuucucuagagcauag

SEQ ID NO: 23944 - RNA, 23 nt, artificial
  Oligomer
uagacuuuucucuagagcauagu

SEQ ID NO: 23945 - RNA, 23 nt, artificial
  Oligomer
agcuuagaauucugggcagauaa

SEQ ID NO: 23946 - RNA, 23 nt, artificial
  Oligomer
gcuuagaauucugggcagauaaa

SEQ ID NO: 23947 - RNA, 23 nt, artificial
  Oligomer
cuuagaauucugggcagauaaaa

SEQ ID NO: 23948 - RNA, 23 nt, artificial
  Oligomer
uuagaauucugggcagauaaaag

SEQ ID NO: 23949 - RNA, 23 nt, artificial
  Oligomer
gggcagauaaaaggcaguuuucc

SEQ ID NO: 23950 - RNA, 23 nt, artificial
  Oligomer
ggcagauaaaaggcaguuuucca

SEQ ID NO: 23951 - RNA, 23 nt, artificial
  Oligomer
cuggaguuacagggaggcuauuc

SEQ ID NO: 23952 - RNA, 23 nt, artificial
  Oligomer
uggaguuacagggaggcuauucc

SEQ ID NO: 23953 - RNA, 23 nt, artificial
  Oligomer
gaucuuucagguauauggauuuu

SEQ ID NO: 23954 - RNA, 23 nt, artificial
  Oligomer
aucuuucagguauauggauuuuu

SEQ ID NO: 23955 - RNA, 23 nt, artificial
  Oligomer
ucuuucagguauauggauuuuuu

SEQ ID NO: 23956 - RNA, 23 nt, artificial
  Oligomer
ugaauucuugguucuuagcaaaa

SEQ ID NO: 23957 - RNA, 23 nt, artificial
  Oligomer
aucuucuuagguucuggguaacc

SEQ ID NO: 23958 - RNA, 23 nt, artificial
  Oligomer
ucuucuuagguucuggguaaccg

SEQ ID NO: 23959 - RNA, 23 nt, artificial
  Oligomer
caacuguccgaaucaaaacuugu

SEQ ID NO: 23960 - RNA, 23 nt, artificial
  Oligomer
aacuguccgaaucaaaacuugug

SEQ ID NO: 23961 - RNA, 23 nt, artificial
  Oligomer
gcccauauacuuggaaugaacac

SEQ ID NO: 23962 - RNA, 23 nt, artificial
  Oligomer
aguuuuccugguccugccaaaau

SEQ ID NO: 23963 - RNA, 23 nt, artificial
  Oligomer
guuuuccugguccugccaaaaua

SEQ ID NO: 23964 - RNA, 23 nt, artificial
  Oligomer
uuuuccugguccugccaaaauac

SEQ ID NO: 23965 - RNA, 23 nt, artificial
  Oligomer
uuuccugguccugccaaaauacu

SEQ ID NO: 23966 - RNA, 23 nt, artificial
  Oligomer
cacaaaacauguuagaaacuagc

SEQ ID NO: 23967 - RNA, 23 nt, artificial
  Oligomer
acaaaacauguuagaaacuagcc

SEQ ID NO: 23968 - RNA, 23 nt, artificial
  Oligomer
caaaacauguuagaaacuagcca

SEQ ID NO: 23969 - RNA, 23 nt, artificial
  Oligomer
aaaacauguuagaaacuagccag

SEQ ID NO: 23970 - RNA, 23 nt, artificial
  Oligomer
ucuauaacccuugaggguuuaca

SEQ ID NO: 23971 - RNA, 23 nt, artificial
  Oligomer
cuauaacccuugaggguuuacau

SEQ ID NO: 23972 - RNA, 23 nt, artificial
  Oligomer
uauaacccuugaggguuuacaua

SEQ ID NO: 23973 - RNA, 23 nt, artificial
  Oligomer
auaacccuugaggguuuacauaa

SEQ ID NO: 23974 - RNA, 23 nt, artificial
  Oligomer
uaacccuugaggguuuacauaaa

SEQ ID NO: 23975 - RNA, 23 nt, artificial
  Oligomer
acuacuagcucacucaggcuuug

SEQ ID NO: 23976 - RNA, 23 nt, artificial
  Oligomer
gacaucuguaggcuaaguaagcc

SEQ ID NO: 23977 - RNA, 23 nt, artificial
  Oligomer
acaucuguaggcuaaguaagccc

SEQ ID NO: 23978 - RNA, 23 nt, artificial
  Oligomer
caucuguaggcuaaguaagcccc

SEQ ID NO: 23979 - RNA, 23 nt, artificial
  Oligomer
aucuguaggcuaaguaagccccg

SEQ ID NO: 23980 - RNA, 23 nt, artificial
  Oligomer
ucuguaggcuaaguaagccccgg

SEQ ID NO: 23981 - RNA, 23 nt, artificial
  Oligomer
uuucauguauuucuguggaucaa

SEQ ID NO: 23982 - RNA, 23 nt, artificial
  Oligomer
aucacacuauuacaguacauaga

SEQ ID NO: 23983 - RNA, 23 nt, artificial
  Oligomer
ucacacuauuacaguacauagau

SEQ ID NO: 23984 - RNA, 23 nt, artificial
  Oligomer
cacacuauuacaguacauagauc

SEQ ID NO: 23985 - RNA, 23 nt, artificial
  Oligomer
acacuauuacaguacauagaucu

SEQ ID NO: 23986 - RNA, 23 nt, artificial
  Oligomer
gugcucugaagugaaaagaagca

SEQ ID NO: 23987 - RNA, 23 nt, artificial
  Oligomer
ugcucugaagugaaaagaagcag

SEQ ID NO: 23988 - RNA, 23 nt, artificial
  Oligomer
ucaaaaagguugcccaggaacuu

SEQ ID NO: 23989 - RNA, 23 nt, artificial
  Oligomer
caaaaagguugcccaggaacuua

SEQ ID NO: 23990 - RNA, 23 nt, artificial
  Oligomer
aaaaagguugcccaggaacuuac

SEQ ID NO: 23991 - RNA, 23 nt, artificial
  Oligomer
acuguuggaaguacagcuguaau

SEQ ID NO: 23992 - RNA, 23 nt, artificial
  Oligomer
aaaagccgcgucuugucaguuuc

SEQ ID NO: 23993 - RNA, 23 nt, artificial
  Oligomer
cucguaacaucagggaaugaaac

SEQ ID NO: 23994 - RNA, 23 nt, artificial
  Oligomer
ucguaacaucagggaaugaaaca

SEQ ID NO: 23995 - RNA, 23 nt, artificial
  Oligomer
cguaacaucagggaaugaaacag

SEQ ID NO: 23996 - RNA, 23 nt, artificial
  Oligomer
guaacaucagggaaugaaacaga

SEQ ID NO: 23997 - RNA, 23 nt, artificial
  Oligomer
uaacaucagggaaugaaacagac

SEQ ID NO: 23998 - RNA, 23 nt, artificial
  Oligomer
caucuucuuagguucuggguaac

SEQ ID NO: 23999 - RNA, 23 nt, artificial
  Oligomer
uugccuaaguauaccucauucag

SEQ ID NO: 24000 - RNA, 23 nt, artificial
  Oligomer
guccugccaaaauacuacuagcu

SEQ ID NO: 24001 - RNA, 23 nt, artificial
  Oligomer
uccugccaaaauacuacuagcuc

SEQ ID NO: 24002 - RNA, 23 nt, artificial
  Oligomer
ccugccaaaauacuacuagcuca

SEQ ID NO: 24003 - RNA, 23 nt, artificial
  Oligomer
cugccaaaauacuacuagcucac

SEQ ID NO: 24004 - RNA, 23 nt, artificial
  Oligomer
ugccaaaauacuacuagcucacu

SEQ ID NO: 24005 - RNA, 23 nt, artificial
  Oligomer
aaggaacauuuuuguggcucagg

SEQ ID NO: 24006 - RNA, 23 nt, artificial
  Oligomer
aggaacauuuuuguggcucaggc

SEQ ID NO: 24007 - RNA, 23 nt, artificial
  Oligomer
ggaacauuuuuguggcucaggcu

SEQ ID NO: 24008 - RNA, 23 nt, artificial
  Oligomer
ccaacucaaauuugcuagcccua

SEQ ID NO: 24009 - RNA, 23 nt, artificial
  Oligomer
acguucccguaggacaucuguag

SEQ ID NO: 24010 - RNA, 23 nt, artificial
  Oligomer
cguucccguaggacaucuguagg

SEQ ID NO: 24011 - RNA, 23 nt, artificial
  Oligomer
guucccguaggacaucuguaggc

SEQ ID NO: 24012 - RNA, 23 nt, artificial
  Oligomer
uucccguaggacaucuguaggcu

SEQ ID NO: 24013 - RNA, 23 nt, artificial
  Oligomer
ucccguaggacaucuguaggcua

SEQ ID NO: 24014 - RNA, 23 nt, artificial
  Oligomer
ugcagcucuuccucucucagcca

SEQ ID NO: 24015 - RNA, 23 nt, artificial
  Oligomer
uaaggucauaaauacauaagucc

SEQ ID NO: 24016 - RNA, 23 nt, artificial
  Oligomer
ugaaauaagcuugaaucuucaga

SEQ ID NO: 24017 - RNA, 23 nt, artificial
  Oligomer
agacugaggagguaguuguuuag

SEQ ID NO: 24018 - RNA, 23 nt, artificial
  Oligomer
gacugaggagguaguuguuuagu

SEQ ID NO: 24019 - RNA, 23 nt, artificial
  Oligomer
ugugcucugaagugaaaagaagc

SEQ ID NO: 24020 - RNA, 23 nt, artificial
  Oligomer
aagaagcaguaagagaauuaaag

SEQ ID NO: 24021 - RNA, 23 nt, artificial
  Oligomer
agaagcaguaagagaauuaaagu

SEQ ID NO: 24022 - RNA, 23 nt, artificial
  Oligomer
gaagcaguaagagaauuaaaguc

SEQ ID NO: 24023 - RNA, 23 nt, artificial
  Oligomer
aagcaguaagagaauuaaagucu

SEQ ID NO: 24024 - RNA, 23 nt, artificial
  Oligomer
agcaguaagagaauuaaagucuc

SEQ ID NO: 24025 - RNA, 23 nt, artificial
  Oligomer
acagggaggcuauuccacuuaga

SEQ ID NO: 24026 - RNA, 23 nt, artificial
  Oligomer
uccacuuagagggaguccuggag

SEQ ID NO: 24027 - RNA, 23 nt, artificial
  Oligomer
auccaaggaauguggucuggggg

SEQ ID NO: 24028 - RNA, 23 nt, artificial
  Oligomer
uacagaagauggucauauugcuc

SEQ ID NO: 24029 - RNA, 23 nt, artificial
  Oligomer
gugauggaugauacauugauaca

SEQ ID NO: 24030 - RNA, 23 nt, artificial
  Oligomer
ugauggaugauacauugauacaa

SEQ ID NO: 24031 - RNA, 23 nt, artificial
  Oligomer
gauggaugauacauugauacaag

SEQ ID NO: 24032 - RNA, 23 nt, artificial
  Oligomer
auggaugauacauugauacaagc

SEQ ID NO: 24033 - RNA, 23 nt, artificial
  Oligomer
uuccugguccugccaaaauacua

SEQ ID NO: 24034 - RNA, 23 nt, artificial
  Oligomer
augggaauauuacauggacaagc

SEQ ID NO: 24035 - RNA, 23 nt, artificial
  Oligomer
ugggaauauuacauggacaagcu

SEQ ID NO: 24036 - RNA, 23 nt, artificial
  Oligomer
gggaauauuacauggacaagcuu

SEQ ID NO: 24037 - RNA, 23 nt, artificial
  Oligomer
ccagguuuucaaagucauuucuc

SEQ ID NO: 24038 - RNA, 23 nt, artificial
  Oligomer
cuacuagcucacucaggcuuugg

SEQ ID NO: 24039 - RNA, 23 nt, artificial
  Oligomer
uacuagcucacucaggcuuuggu

SEQ ID NO: 24040 - RNA, 23 nt, artificial
  Oligomer
acuagcucacucaggcuuugguu

SEQ ID NO: 24041 - RNA, 23 nt, artificial
  Oligomer
cuagcucacucaggcuuugguuu

SEQ ID NO: 24042 - RNA, 23 nt, artificial
  Oligomer
uagcucacucaggcuuugguuuu

SEQ ID NO: 24043 - RNA, 23 nt, artificial
  Oligomer
gggaaacugcugucugucuuaug

SEQ ID NO: 24044 - RNA, 23 nt, artificial
  Oligomer
ggaaacugcugucugucuuaugu

SEQ ID NO: 24045 - RNA, 23 nt, artificial
  Oligomer
gaaacugcugucugucuuauguc

SEQ ID NO: 24046 - RNA, 23 nt, artificial
  Oligomer
acagacuauccaucuguugcuug

SEQ ID NO: 24047 - RNA, 23 nt, artificial
  Oligomer
cagacuauccaucuguugcuugu

SEQ ID NO: 24048 - RNA, 23 nt, artificial
  Oligomer
agacuauccaucuguugcuuguu

SEQ ID NO: 24049 - RNA, 23 nt, artificial
  Oligomer
gacuauccaucuguugcuuguuu

SEQ ID NO: 24050 - RNA, 23 nt, artificial
  Oligomer
caagagaaacaggguucacaagc

SEQ ID NO: 24051 - RNA, 23 nt, artificial
  Oligomer
aagagaaacaggguucacaagcu

SEQ ID NO: 24052 - RNA, 23 nt, artificial
  Oligomer
agagaaacaggguucacaagcuc

SEQ ID NO: 24053 - RNA, 23 nt, artificial
  Oligomer
gagaaacaggguucacaagcucu

SEQ ID NO: 24054 - RNA, 23 nt, artificial
  Oligomer
agaaacaggguucacaagcucug

SEQ ID NO: 24055 - RNA, 23 nt, artificial
  Oligomer
caguucucuccacuauggcuugu

SEQ ID NO: 24056 - RNA, 23 nt, artificial
  Oligomer
aguucucuccacuauggcuuguu

SEQ ID NO: 24057 - RNA, 23 nt, artificial
  Oligomer
gcccagauagaaguggcuccagg

SEQ ID NO: 24058 - RNA, 23 nt, artificial
  Oligomer
cccagauagaaguggcuccaggu

SEQ ID NO: 24059 - RNA, 23 nt, artificial
  Oligomer
ccagauagaaguggcuccagguu

SEQ ID NO: 24060 - RNA, 23 nt, artificial
  Oligomer
ggagguaguuguuuagucacagg

SEQ ID NO: 24061 - RNA, 23 nt, artificial
  Oligomer
uuuccagaaauugagaggucuau

SEQ ID NO: 24062 - RNA, 23 nt, artificial
  Oligomer
uuccagaaauugagaggucuauu

SEQ ID NO: 24063 - RNA, 23 nt, artificial
  Oligomer
uaagugugcucugaagugaaaag

SEQ ID NO: 24064 - RNA, 23 nt, artificial
  Oligomer
gaaaaaaugaauacuuguauggg

SEQ ID NO: 24065 - RNA, 23 nt, artificial
  Oligomer
cuccauuguguugguuccacauu

SEQ ID NO: 24066 - RNA, 23 nt, artificial
  Oligomer
aacuguuggaaguacagcuguaa

SEQ ID NO: 24067 - RNA, 23 nt, artificial
  Oligomer
agagaaaggugaagauaaaagcc

SEQ ID NO: 24068 - RNA, 23 nt, artificial
  Oligomer
gagaaaggugaagauaaaagccg

SEQ ID NO: 24069 - RNA, 23 nt, artificial
  Oligomer
agaaaggugaagauaaaagccgc

SEQ ID NO: 24070 - RNA, 23 nt, artificial
  Oligomer
gaaaggugaagauaaaagccgcg

SEQ ID NO: 24071 - RNA, 23 nt, artificial
  Oligomer
aaaggugaagauaaaagccgcgu

SEQ ID NO: 24072 - RNA, 23 nt, artificial
  Oligomer
ucuggguaaccguguauagauga

SEQ ID NO: 24073 - RNA, 23 nt, artificial
  Oligomer
ggcagucuauaacccuugagggu

SEQ ID NO: 24074 - RNA, 23 nt, artificial
  Oligomer
gcagucuauaacccuugaggguu

SEQ ID NO: 24075 - RNA, 23 nt, artificial
  Oligomer
cagucuauaacccuugaggguuu

SEQ ID NO: 24076 - RNA, 19 nt, Artificial
  Oligomer
gagaacuauccaaaacuaa

SEQ ID NO: 24077 - RNA, 19 nt, Artificial
  Oligomer
ggaggugacccgaauuaua

SEQ ID NO: 24078 - RNA, 19 nt, Artificial
  Oligomer
gcaguaagcuaucuucaaa

SEQ ID NO: 24079 - RNA, 19 nt, Artificial
  Oligomer
cagagaggucuaacaccaa

SEQ ID NO: 24080 - RNA, 19 nt, Artificial
  Oligomer
gagacuaucugauuuccua

SEQ ID NO: 24081 - RNA, 19 nt, Artificial
  Oligomer
gaucguuguuuacagugua

SEQ ID NO: 24082 - RNA, 19 nt, Artificial
  Oligomer
uuaguuuuggauaguucuc

SEQ ID NO: 24083 - RNA, 19 nt, Artificial
  Oligomer
uauaauucgggucaccucc

SEQ ID NO: 24084 - RNA, 19 nt, Artificial
  Oligomer
uuugaagauagcuuacugc

SEQ ID NO: 24085 - RNA, 19 nt, Artificial
  Oligomer
uugguguuagaccucucug

SEQ ID NO: 24086 - RNA, 19 nt, Artificial
  Oligomer
uaggaaaucagauagucuc

SEQ ID NO: 24087 - RNA, 19 nt, Artificial
  Oligomer
uacacuguaaacaacgauc

SEQ ID NO: 24088 - RNA, 19 nt, Artificial
  Oligomer
ccuacauuuggagccugga

SEQ ID NO: 24089 - RNA, 19 nt, Artificial
  Oligomer
cggcagcuguacauugacu

SEQ ID NO: 24090 - RNA, 19 nt, Artificial
  Oligomer
ggcagcuguacauugacuu

SEQ ID NO: 24091 - RNA, 19 nt, Artificial
  Oligomer
cacacagcauauauauguu

SEQ ID NO: 24092 - RNA, 19 nt, Artificial
  Oligomer
uccaggcuccaaauguagg

SEQ ID NO: 24093 - RNA, 19 nt, Artificial
  Oligomer
agucaauguacagcugccg

SEQ ID NO: 24094 - RNA, 19 nt, Artificial
  Oligomer
aagucaauguacagcugcc

SEQ ID NO: 24095 - RNA, 19 nt, Artificial
  Oligomer
aacauauauaugcugugug

SEQ ID NO: 24096 - RNA, 19 nt, Artificial
  Oligomer
ccuuucaaauugugaagaa

SEQ ID NO: 24097 - RNA, 19 nt, Artificial
  Oligomer
gucucuacaucacagaaga

SEQ ID NO: 24098 - RNA, 19 nt, Artificial
  Oligomer
uucuucacaauuugaaagg

SEQ ID NO: 24099 - RNA, 19 nt, Artificial
  Oligomer
ucuucugugauguagagac

SEQ ID NO: 24100 - RNA, 19 nt, Artificial
  Oligomer
cauaguuuccagaagcaga

SEQ ID NO: 24101 - RNA, 19 nt, Artificial
  Oligomer
gcgccuuugcucaugacau

SEQ ID NO: 24102 - RNA, 19 nt, Artificial
  Oligomer
ucugcuucuggaaacuaug

SEQ ID NO: 24103 - RNA, 19 nt, Artificial
  Oligomer
augucaugagcaaaggcgc

SEQ ID NO: 24104 - RNA, 19 nt, Artificial
  Oligomer
gggucaagagcauaaggau

SEQ ID NO: 24105 - RNA, 19 nt, Artificial
  Oligomer
cuagaaaaugucacuugaa

SEQ ID NO: 24106 - RNA, 19 nt, Artificial
  Oligomer
gccacaucuuaccuguaaa

SEQ ID NO: 24107 - RNA, 19 nt, Artificial
  Oligomer
caaaaguaaucgcucugga

SEQ ID NO: 24108 - RNA, 19 nt, Artificial
  Oligomer
cugucaguaucugggucaa

SEQ ID NO: 24109 - RNA, 19 nt, Artificial
  Oligomer
ccauccacugacucguaaa

SEQ ID NO: 24110 - RNA, 19 nt, Artificial
  Oligomer
ccuuagucuccuacuuaga

SEQ ID NO: 24111 - RNA, 19 nt, Artificial
  Oligomer
auccuuaugcucuugaccc

SEQ ID NO: 24112 - RNA, 19 nt, Artificial
  Oligomer
uucaagugacauuuucuag

SEQ ID NO: 24113 - RNA, 19 nt, Artificial
  Oligomer
uuuacagguaagauguggc

SEQ ID NO: 24114 - RNA, 19 nt, Artificial
  Oligomer
uccagagcgauuacuuuug

SEQ ID NO: 24115 - RNA, 19 nt, Artificial
  Oligomer
uugacccagauacugacag

SEQ ID NO: 24116 - RNA, 19 nt, Artificial
  Oligomer
uuuacgagucaguggaugg

SEQ ID NO: 24117 - RNA, 19 nt, Artificial
  Oligomer
ucuaaguaggagacuaagg
